(19) United States
(12) Patent Application Publication
(10) Pub. No.: US 2010/0291120 A1
(43) Pub. Date: Nov. 18, 2010

(54) PEPTIDES REGULATING THE SURFACE EXPRESSION OF THE T CELL RECEPTOR

(75) Inventors: Oliver Schmetzer, Berlin (DE); Antonio Pezzutto, Berlin (DE)

Correspondence Address: FAEGRE & BENSON LLP;PATENT DOCKETING - INTELLECTUAL PROPERTY, 2200 WELLS FARGO CENTER, 90 SOUTH SEVENTH STREET, MINNEAPOLIS, MN, 55402-3901, US

(73) Assignee: MAX-DELBRUCK-CENTRUM FUR MOLEKULARE MEDIZIN, Berlin (DE)

(21) Appl. No.: 12/306,176

(22) PCT Filed: Jun. 23, 2007
(86) PCT No.: PCT/EP2007/005553

§ 371 Date: Mar. 5, 2009

(30) Foreign Application Priority Data
Jun. 23, 2006 (EP) EP 06013025.9

(51) Int. Cl. A61K 39/00; C12P 21/06; C12N 5/10; C12N 5/071; C12N 15/63; C40B 30/04; A61K 38/16; A61K 38/10; A61K 31/7088; C07K 14/435; C07K 7/08; C07H 21/04; A01K 67/027

(52) U.S. Cl. 424/185.1; 424/184.1; 435/69.1; 435/325; 435/366; 435/320.1; 506/9; 514/21.3; 514/21.5; 514/44 R; 530/324; 530/326; 536/23.5; 800/14

(57) ABSTRACT

The present invention is related to a peptide comprising an amino acid sequence according to SEQ. ID. No 1.

### CROSS REFERENCE TO RELATED APPLICATIONS

[0001] This application is a U.S. national stage entry of PCT/EP2007/05553, filed Jun. 23, 2007, which claims priority to European Patent Application No. EP 060 13025.9 filed on Jun. 23, 2006, which is incorporated herein by reference in its entirety.

### FIELD

[0002] The present invention is related to peptides regulating the surface expression of the T cell receptor as well as cytokine receptors, nucleic acids coding therefor and agents interacting therewith and uses thereof

### BACKGROUND

[0003] To date, immune-related diseases such as, in particular, infectious diseases and autoimmune disorders are one of the biggest challenges for both human and animal health. The prevention and treatment of this kind of diseases is possible at various levels of the pathogenic mechanism underlying this kind of diseases. One approach is to target the ultimate causative agent which means, in case of infectious diseases, the pathogen and in case of autoimmune disease the respective autoreactive antibodies or lymphocytes. Although this is a reasonable and in quite a number of cases successful approach, however, it still has some drawbacks. These drawbacks are, among others, in case of infectious diseases a shortage of means addressing the pathogen, in particular when it comes to viruses, and an increasing number of resistant strains of various bacteria against a number of antibiotics available for the time being, and in case of autoimmune disorder, the need for constant removal or at least neutralization of autoimmune antibodies or autoreactive immune cells with the autoimmune antibodies being the last element of a cascade and thus being rather abundant requiring a therapeutic approach which is also adequate in terms of titres of neutralizing agents needed.

[0004] A quite opposite approach for the treatment of this kind of diseases is to modify the immune system such as to treat or even prevent this kind of diseases. The more upstream an immune system modifying agent is active, the broader its potential field of use is. One such element which is a preferred molecule of consideration insofar, is the T cell receptor (TCR) as described in M. M. Davis, J. J. Boniface, Z. Reich, D. Lyons, J. Hampl, B. Arden, and Y. Chien: Ligand recognition by alpha beta T cell receptors Annu. Rev. Immunol. 1998. 16: 523-544 .

[0005] A high level of TCR expression on T lymphocyte surfaces is required in most infections for complete removal of the pathogen. The particular relevance of T cell receptor expression insofar is further illustrated by the fact that it takes ten times more low avidity T cells to control infection than high avidity T cells which is particularly important for the development of vaccines as described by Derby, M., Alexander-Miller, M., Tse, R., and Berzofsky, J: High-avidity CTL exploit two complementary mechanisms to provide better protection against viral infection than low-avidity CTL. J Immunol 2001. 166: 1690-1697. The low surface display of antigenic peptides during some virus infection such as, e. g., human immune deficiency virus (HIV) or by hepatitis C virus (HCV) shows that high avidity T cells are needed to protect from infections after vaccination. On the other hand, in autoimmune diseases, obviously, self-antigens are over-recognized by such T cell receptor which, in turn, triggers an over boarding immune response with severe concomitant physiological responses. Insofar, for this kind of disease a blocking of increased surface expression of T cell receptors is highly desirable.

[0006] A problem underlying the present invention was thus to provide means for the treatment of immune-related diseases, and more particularly for the treatment and/or prevention of infections and/or autoimmune disorders. In a further aspect, the present invention was to provide means for increasing the T cell receptor expression on T lymphocytes.

### BRIEF DESCRIPTION OF THE DRAWINGS

[0007] The present invention shall now be further illustrated by reference to the following drawings and examples from which as well as from the sequence listing, further advantages, features and embodiments may be taken.

[0008] FIGS. 1A to C show a CD3delta RT-PCR visualizing the result of an expression analysis of CD3 delta splice variants, whereby more specifically

[0009] FIG. 1A shows the result of an analysis of CD3delta RT-PCR samples from T cell cultures raised against cross-reactive peptides 16 and 23 after 4 h stimulation, whereby mRNA from human spleen is used as control;

[0010] FIG. 1B shows the result of an analysis of CD3delta RT-PCR samples from freshly isolated PBMCs from healthy donors and from patients with autoimmune diseases, whereby RA means rheumatoid arthritis with lymphocytes having been isolated from knee effusions of three patients; GBS means three patients with Guillian-Barré-Syndrom; CIDP means three patients with chronic inflammatory demyelating polyneuropathy;

[0011] FIG. 1C shows the result of a CD3delta RT-PCR of T cell cultures against heteroclitic peptides which were generated with dendritic cells, IL-2, IL-7 and IL-15, whereby the cell cultures have been stimulated for 4 h with the culture peptide or left untreated; and

[0012] FIG. 1D shows the genomic organization of CD3delta and of the derived splice variant CD3 kappa;

[0013] FIG. 2a is a histogram indicating the surface expression strength of CD4+PBMCs expressing TCR upon treatment with CD3 kappa (▪) or with a control peptide (o: same amino-acid composition, but random sequence); whereby also one sample of CD4+ PBMCs expressing TCR upon treatment with CD3 kappa together with PMA and ionomycin is also shown (x);

[0014] FIG. 2b shows histograms indicating the surface expression strength of CD4+ PBMCs expressing TCR and CD4 upon treatment with CD3 kappa, whereby a kinetic ranging from two to six days is shown;

[0015] FIG. 3a is a histogram indicating the surface expression strength of PBMCs expressing surface markers CD2, CD127 and CD58 upon treatment and non-treatment with CD3 kappa after six days;

[0016] FIG. 3b is a Western Blot of a dot blot microarray analysis of T cell secreted factors after various time points, whereby only significant changes cytokine expressions and double dot blots are shown;

[0017] FIG. 3c is a Western Blot of a dot blot microarray analysis of T cell secreted factors after various time points, whereby all analyzed cytokine expression patterns and double dot blots are shown;

[0018] FIG. 4a depicts histograms indicating the surface expression strength of PBMCs expressing various surface markers upon treatment and non-treatment with CD3 kappa after six days;

[0019] FIG. 4b depicts histograms indicating the surface expression strength of PBMCs expressing cytokine- or chemokine-receptors upon treatment and non-treatment with CD3 kappa after six days;

[0020] FIG. 5 is a histogram indicating the surface expression strength of CD4+ PBMCs form healthy controls and patients expressing TCR upon treatment with CD3 kappa, whereby 29 donors with normal expression range (o), 15 donors with a significantly reduced TCR-expression (▪) and 6 donors with a even more significantly reduced TCR-expression due to high doses of cytostatic chemotherapy (▴) are shown.

### DETAILED DESCRIPTION

[0021] In a first aspect the problem underlying the present invention is solved by a peptide comprising an amino acid sequence according to SEQ. ID. No 1.

[0022] In an embodiment the peptide comprises at least an amino acid sequence encoded by at least one exon of the CD3 gene complex or part thereof.

[0023] In a preferred embodiment the amino acid sequence is encoded by exons 2 and 4 of the CD3 gene.

[0024] In a second aspect the problem underlying the present invention is solved by a peptide comprising an amino acid sequence according to SEQ.ID.No 4.

[0025] In an embodiment of the first and the second aspect the peptide increases or prolongs the expression of the T cell receptor.

[0026] In a preferred embodiment of the first and the second aspect the expression is the expression of the T cell receptor on the cell surface of T cells, more specifically on the cell surface of T lymphocytes.

[0027] In an embodiment of the first and second aspect the peptide blocks or reduces internalization of the T cell receptor.

[0028] In an embodiment of the first and second aspect the peptide increases the expression of a compound selected from the group comprising CD4, CD2, CD25, CD116, CD127, CCR5, CCR9, CXCR1, CXCR3, EGF, Eotaxin-2, 1-309, IFNgamma, IL-1 alpha, IL-1 beta, IL-3, IL-6, NAP-2, TGF-beta3, and PARC.

[0029] In an embodiment of the first and second aspect the peptide decreases the expression of a compound selected from the group comprising CD58, IL-1ra, IL-8, RANTES, SDF-1, TARC, MCP-4, GRO, soluble IL-6 receptor and soluble TNF-receptor II.

[0030] In an embodiment of the first and second aspect the peptide is labelled, preferably by having incorporated a labelled amino acid, whereby more preferably the labelled amino acid is radioactively labelled with tritium, C-14, I-125 or S-35; or whereby the labelled amino acid is labelled with a NMR-active isotope, most preferably with deuterium, C-13 or N-15.

[0031] In an embodiment of the first and second aspect the peptide further comprises a moiety which is suitable for detection using a method for detection, whereby such moiety is preferably selected from the group comprising fluorophores, radioactive tracers and haptens, whereby preferably the hapten is biotin.

[0032] In a third aspect the problem underlying the present invention is solved by a complex comprising a peptide selected from the group comprising a peptide according to any of claims 1 to 11, and a receptor molecule selected from the group comprising the T-cell receptor, CD4, CD2, CD25, CD127, CCR5, CCR9, CXCR1, CXCR3 and the GM-CSF receptor (CD116).

[0033] In a fourth aspect the problem underlying the present invention is solved by a nucleic acid coding for a peptide according to the first and second aspect.

[0034] In an embodiment of the fourth aspect the nucleic acid comprises a nucleic acid sequence according to SEQ.ID.No 2 or SEQ.ID.No.3, or a derivative thereof

[0035] In a preferred embodiment of the fourth aspect the derivative is a nucleic acid
[0036] (a) which is essentially complementary to the nucleic acid sequence according to SEQ.ID.No 2 or to SEQ.ID.No.3; or
[0037] (b) which hybridises to the nucleic acid sequence according to the nucleic acid sequence according to SEQ.ID.No.2 or SEQ.ID.No.3; or
[0038] (c) which, but for the degeneracy of the genetic code, would hybridise to the nucleic acid of (a) or (b).

[0039] In a more preferred embodiment of the fourth aspect the hybridisation is a hybridisation under stringent conditions

[0040] In a fifth aspect the problem underlying the present invention is solved by a vector comprising a nucleic acid according to the fourth aspect, whereby the vector is preferably an expression vector.

[0041] In an embodiment of the fifth aspect the vector is selected from the group comprising mammalian, microbial, insect and viral vectors.

[0042] In a sixth aspect the problem underlying the present invention is solved by a host cell comprising a nucleic acid according to the fourth aspect and/or a vector according to the fifth aspect.

[0043] In an embodiment of the sixth aspect, the host cell is an animal cell, preferably a mammalian cell.

[0044] In a preferred embodiment of the sixth aspect if the mammalian cell is a human cell, such human cell is an in vitro human cell.

[0045] In a seventh aspect the problem underlying the present invention is solved by an organism comprising a host cell according to the sixth aspect, whereby the organism is a non-human animal, preferably a non-human mammal.

[0046] In an eighth aspect the problem underlying the present invention is solved by a method for producing a peptide according to the first and second aspect, comprising the following steps:
[0047] (a) cultivating a cell according to the sixth aspect in a medium under conditions which allow the production of the peptide; and
[0048] (b) harvesting the peptide; and
[0049] (c) optionally purifying the peptide.

[0050] In a [[nineth]] ninth aspect the problem underlying the present invention is solved by the use of a peptide according to the first and second aspect for the manufacture of a medicament.

[0051] In a tenth aspect the problem underlying the present invention is solved by the use of a nucleic acid according to the fourth aspect for the manufacture of a medicament.

[0052] In an embodiment of the [[nineth]] ninth and tenth aspect the medicament is for the treatment and/or prevention of a disease, whereby such disease goes along or is associated with a decreased T cell receptor expression.

[0053] In an embodiment of the [[nineth]] ninth and tenth aspect the medicament is for the treatment and/or prevention of a disease, whereby such disease goes along or is associated with a decreased expression of a compound selected from the group comprising CD4, CD2, CD25, CD116, CD127, CCR5, CCR9, CXCR1, CXCR3, EGF, Eotaxin-2, 1-309, IFNgamma, IL-lalpha, IL-1 beta, IL-3, IL-6, NAP-2, TGF-beta3, and PARC.

[0054] In an embodiment of the [[nineth]] ninth and tenth aspect the medicament is for the treatment and/or prevention of a disease, whereby such disease goes along or is associated with an increased expression of a compound selected from the group comprising CD58, IL-1ra, IL-8, RANTES, SDF-1, TARC, MCP-4, GRO, soluble IL-6 receptor and soluble TNF-receptor II.

[0055] In a preferred embodiment of the [[nineth]] ninth and tenth aspect the disease is selected from the group comprising infectious diseases.

[0056] In a more preferred embodiment of the [[nineth]] ninth and tenth aspect the disease is selected from the group comprising HIV infection and hepatitis C infection.

[0057] In an embodiment of the [[nineth]] ninth and tenth aspect the medicament is for the treatment and/or prevention of a disease, whereby such disease is a disease associated with or caused by an increased expression of the T cell receptor, preferably an increased expression of the T cell receptor on the surface of T lymphocytes, and more preferably such disease is selected from the group comprising autoimmune diseases.

[0058] In a preferred embodiment of the [[nineth]] ninth and tenth aspect the disease is selected from the group comprising rheumatoid arthritis.

[0059] In an embodiment of the [[nineth]] ninth and tenth aspect the medicament is for immuno-compromised or immuno suppressed patients.

[0060] In an embodiment of the [[nineth]] ninth and tenth aspect the medicament is for patients suffering from T cell depletion.

[0061] In a preferred embodiment of the [[nineth]] ninth and tenth aspect the T cell depletion is a drug induced T cell depletion, preferably a T cell [[depeletion]] depletion induced by a chemotherapeutic agent.

[0062] In an embodiment of the [[nineth]] ninth and tenth aspect the patients are subject who have or will undergo transplantation.

[0063] In an eleventh aspect the problem underlying the present invention is solved by the use of a peptide according to the first and second aspect as and/or for the manufacture of an adjuvant.

[0064] In a twelfth aspect the problem underlying the present invention is solved by the use of a nucleic acid according to the fourth aspect as and/or for the manufacture of an adjuvant.

[0065] In an embodiment of the eleventh and twelfth aspect the adjuvant is for use in vaccination, preferably in vaccination against poorly immunogenic antigens.

[0066] In a thirteenth aspect the problem underlying the present invention is solved by a method for the screening of an agent for the development and/or manufacture of a medicament for the treatment and/or prevention of a disease and/or for the development and/or manufacture of a diagnostic agent for the diagnosis of a disease, whereby the disease is a disease as defined in any of the preceding aspects and any pathological conditions an overexpression or underexpression of the T cell receptor, comprising the steps:
[0067] a) providing a candidate compound,
[0068] b) providing an expression system for the peptide according to the first and second aspect and/or a system detecting the activity of such peptide;
[0069] c) contacting the candidate compound with the expression system for said peptide and/or the system detecting the activity of said peptide;
[0070] d) determining if the expression and/or the activity of said peptide is changed under the influence of the candidate compound.

[0071] In an embodiment of the thirteenth aspect the candidate compound is contained in a library of compounds.

[0072] In an embodiment of the thirteenth aspect the candidate compound is selected from the group of classes of compounds comprising peptides, proteins, antibodies, anticalines, functional nucleic acids, natural compounds and small molecules.

[0073] In a preferred embodiment of the thirteenth aspect the functional nucleic acids are selected from the group which comprises aptameres, aptazymes, ribozymes, spiegelmers, antisense oligonucleotides and siRNA.

[0074] In a fourteenth aspect the problem underlying the present invention is solved by the use of a peptide according to the first and second aspect or a part or derivative thereof and/or nucleic acid or a part or derivative thereof coding for said peptide or a part or a derivative thereof as target molecule for the development and/or manufacture of a medicament for the treatment and/or prevention of a disease and/or for the development and/or manufacture of a diagnostic agent for the diagnosis of a disease, whereby the disease is a disease as defined in any of the proceeding aspects.

[0075] In an embodiment of the fourteenth aspect the medicament and/or the diagnostic agent comprises an agent, which is selected from the group comprising antibodies, peptides, anticalines, small molecules, antisense molecules, aptameres, spiegelmers and RNAi molecules.

[0076] In a preferred embodiment of the fourteenth the agent interacts with the peptide according to the first and second aspect.

[0077] In an embodiment of the fourteenth the agent interacts with the nucleic acid coding for the peptide according to the first and the second aspect or a part or derivative thereof, in particular with mRNA, genomic nucleic acid or cDNA for said peptide.

[0078] In a fifteenth aspect the problem underlying the present invention is solved by the use of a polypeptide which interacts with the peptide according to the first and second aspect or a part or derivative thereof, for the development or manufacture of a medicament for the treatment and/or prevention of a disease and/or for the development and/or manufacture of a diagnostic agent for the diagnosis of a disease, whereby the disease is a disease as defined in any of the preceding aspects.

[0079] In an embodiment of the fifteenth aspect the polypeptide is selected from the group, which comprises antibodies against said peptide or a part or derivative thereof and polypeptides binding said peptide or a part or derivative thereof

[0080] In a sixteenth aspect the problem underlying the present invention is solved by the use of a nucleic acid which interacts with a peptide according to the first and second aspect or a part or derivative thereof, for the development or manufacture of a medicament for the treatment and/or prevention of a disease and/or for the development and/or the manufacture of a diagnostic agent for the diagnosis of a disease, whereby the disease is a disease as defined in any of the preceding claims.

[0081] In an embodiment of the sixteenth aspect the nucleic acid is selected from the group which comprises aptamers and spiegelmers.

[0082] In a seventeenth aspect the problem underlying the present invention is solved by the use of a nucleic acid which interacts with a nucleic acid coding for a peptide according to the first and second aspect or a part or derivative thereof, for the development and/or manufacture of a medicament for the treatment and/or prevention of a disease and/or for the development and/or manufacture of a diagnostic agent for the diagnosis of a disease, whereby the disease is a disease as defined in connection with the first and second aspect.

[0083] In an embodiment of the seventeenth aspect the interacting nucleic acid is an antisense oligonucleotide, a ribozyme and/or siRNA.

[0084] In an embodiment of the seventeenth aspect the nucleic acid coding for the peptide or a part or derivative thereof is the cDNA, mRNA or hnRNA.

[0085] In an embodiment of the fourteenth to seventeenth aspect the disease is a disease associated with or caused by an increased expression of the T cell receptor, preferably an increased expression of the T cell receptor on the surface of T lymphocytes, and more preferably such disease is selected from the group comprising autoimmune diseases.

[0086] In an eighteenth aspect the problem underlying the present invention is solved by a pharmaceutical composition comprising at least one agent selected from the group comprising the peptide according to the first and second aspect or a part or derivative thereof, small molecules interacting with the peptide according to the first and second aspect or a part or derivative thereof or with a nucleic acid coding for the peptide according to the first and second aspect or a part or derivative thereof, antibodies specific for the peptide according to the first and second aspect or a part or derivative thereof, polypeptides interacting with the peptide according to the first and second aspect or a part or derivative thereof, a nucleic acid coding for the peptide according to the first and second aspect or a part or derivative thereof, nucleic acids interacting with the peptide according to the first and second aspect or a part or derivative thereof or nucleic acids interacting with a nucleic acid coding for the peptide according to the first and second aspect or a part or derivative thereof, and at least one pharmaceutically acceptable carrier, preferably for the prevention and/or the treatment of a disease whereby the disease is a disease as defined in any of the preceding claims.

[0087] In a nineteenth aspect the problem underlying the present invention is solved by a kit for the characterisation of a disease or a condition as defined in any of the preceding claims, comprising at least one agent which is selected from the group comprising the peptide according to the first and second aspect or a part or derivative thereof, antibodies specific for the peptide according to the first and second aspect or a part or derivative thereof, polypeptides interacting with the peptide according to the first and second aspect or a part or derivative thereof, polypeptides interacting with a nucleic acid coding for the peptide according to the first and second aspect or a part or derivative thereof, nucleic acids interacting with the peptide according to the first and second aspect or a part or derivative thereof, nucleic acids interacting with a nucleic acid coding for the peptide according to the first and second aspect or a part or derivative thereof, and optionally at least one other compound.

[0088] The present inventors have surprisingly found that the sensitivity and function of T lymphocytes to antigenic stimulation can be increased by a peptide which is referred to herein as CD3 kappa and its derivatives. Also, the present inventors have surprisingly found that CD3 kappa is suitable to improve the surface expression of the T cell receptor on the surface of cells. Finally the present inventor has found that CD3 kappa has a direct or indirect impact on the expression of distinct Cytokines and/or Chemokines, and on the expression of some Chemokine and/or Cytokine-Receptors.

[0089] More particularly, the present inventors have found a new splice variant of CD3 providing a new open reading frame comprising the amino acid sequence according to SEQ ID NO. 1. This open reading frame encodes a peptide which is responsible for changing the characteristics and biological behaviour of the splice variant of CD3 disclosed herein. This peptide has the amino acid sequence according to SEQ.ID:No.4 and is referred to as CD3 kappa or CD3 kappa peptide. Without wishing to be bound by any theory, the peptide encoded by this new open reading frame and the CD3 kappa peptide, respectively, seems to avoid the internalization of the T cell receptor thus being, either directly or indirectly, involved in the improved, this is to say increased and/or prolonged surface expression of the T cell receptor. The peptide which is encoded by said new open reading frame is also referred to herein as CD3 kappa-ORF. Said CD3 kappa-ORF forms the C terminal part of CD3 kappa peptide having the amino acid sequence according to SEQ ID NO. 4. CD3 kappa is another splice variant of CD3 delta. Compared to CD3 delta, however, CD3 kappa is lacking exon 3 and a part of exon 2 but contains the entire exons 1, 4 and 5. CD3 kappa is in particular expressed by peripheral blood leukocytes, optionally along with other CD3 delta isoforms. CD3 kappa is, again without wishing to be bound by any theory, suitable to increase the sensitivity of T lymphocytes to antigenic stimulation, whereby such increased sensitivity seems to be based on an improved expression and/or surface display of the TCR on T lymphocytes. Also, CD3 kappa is, without whishing to be bound by any theory, suitable to provide for an improved expression of the TCR on T lymphocytes, more specifically on the surface of T-lymphocytes.

[0090] CD3 kappa also, moreover without wishing to be bound by any theory, has a direct or indirect effect on the expression of distinct Cytokines and/or Chemokines, and on the expression of some Chemokine and/or Cytokine-Receptors. More specifically CD3 kappa leads to an increased release of pro-inflammatory cytokines and chemokines, most specifically of EGF, Eotaxin-2, 1-309, IFNγ, IL-1α, IL-1β, IL-3, IL-6, NAP-2, TGFβ3 and PARC; while CD3 kappa induces a decreased release of IL-1ra, IL-8, RANTES, SDF-1, TARC, MCP-4, GRO, soluble IL-6 Receptor and soluble TNF-Receptor II by peripheral blood mononuclear cells. The described changes in secretion occur more specifically after about 24 h upon addition of CD3 kappa and last for up to eight days in vitro. CD3 kappa leads to an up-regulation of CD4 and CD2, and of some Chemokine and Cytokine-Receptors, more specifically of Cytokine/Chemokine-Receptors which lead to anti-apoptotic and/or proliferation inducing effects. Most specifically CD3 kappa leads to an up-regulation of CD25, CD116, CD127, CCR3, CCR9 and CXCR1. CD3 kappa also leads to a slight upregulation of CXCR3 and CXCR4.

[0091] As preferably used herein, the term “improved expression” or “upregulation” shall, in a preferred embodiment, mean that the expression of the TCR and of the Cytokine/Chemokine-receptors is increased, whereby such increase in expression can be, alternatively or additionally, a prolonged expression of the individual receptor or an increase of the number of individual receptors preferably by increased translation and/or transcription. More preferably, the lifetime of the expression of the individual receptor is increased.

[0092] In a preferred embodiment the term “surface expression” or “up-regulation” shall be the presence of the TCR and of the Cytokine/Chemokine-receptors on a surface of a cell. Preferably, the cell is a mammalian cell and more preferably the cell is an immune and/or hematopoetic cell, e.g., a T lymphocyte and most preferably the cell is a CD4+ T lymphocyte.

[0093] In a preferred embodiment, the T cell receptor is the human T cell receptor and is, for example, described in M. M. Davis, J. J. Boniface, Z. Reich, D. Lyons, J. Hampl, B. Arden, and Y. Chien: Ligand recognition by alpha beta T cell receptors Annu. Rev. Immunol. 1998. 16: 523-544.

[0094] The term “surface” as preferably used herein refers to a surface present either on the outside of the cell or on the boundary of a cell which is preferably formed by a cytoplasm membrane separating the cytoplasm of a cell from the environment around a cell, or to rapidly exchanged or exchanging membrane compartments which are preserved in intracellular compartments e.g. endosomes or lysosomes, in which parts of the cytoplasm membrane is recycled or recycling. Most preferably the term “surface” refers to lipid rafts in the cytoplasm membrane.

[0095] The T cell receptor is an alpha:beta-heterodimer consisting of one T cell receptor-alpha chain and one T cell receptor-beta (TCR beta) chain. About 30,000 molecules of this kind of T cell receptors are present on a normal human T cell. Apart from the alpha:beta T cell receptor, there is also a subpopulation of T cells with a T cell receptor which is different from the alpha:beta T cell receptor and consists of a heterodimer of gamma- and delta chains. In connection with the present invention, these gamma:delta-T cell receptors or other theoretically possible heterodimeric receptors consisting of two of these four chains are comprised by the term alpha:beta-T cell receptors which is, in turn, generally referred to as T cell receptor or TCR.

[0096] Also, the term T cell receptor shall comprise the T cell receptor complex, if not explicitly stated to the contrary. Such T cell receptor complex comprises apart from the T cell receptor in the narrower sense, i.[[ ]]e., consisting of the alpha:beta-heterodimer, also in general four CD3 molecules or functional homologous molecules, namely gamma, delta, epsilon, eta and also zeta, whereby CD3 epsilon forms a complex with either the CD3 delta or the CD3 gamma chain. CD3 zeta can be a homodimer or a Heterodimer with CD3 eta or other molecules. However the lack of one or more CD3 chains is possible, including any variations as found by different splicing. It will be acknowledged that other factors may be comprised by the T cell receptor complex and thus by the T cell receptor as used herein.

[0097] In a preferred embodiment the term that “the expression of the T cell receptor is increased”, refers to the result of a comparison made between the T cell receptor in a patient with CD3 kappa and a healthy subject without CD3 kappa. A patient is preferably a diseased subject or a subject suspected of suffering from a disease or a subject being prone to such disease. A healthy subject preferably is either the same or a different subject not being diseased or not being prone to be diseased or a group of persons not diseased or not being prone to be diseased. The comparison is made between a patient and a healthy subject, whereby the measures needed insofar are preferably commonly known to the ones skilled in the art. Preferably such measures comprise obtaining a sample from the patient and healthy subject, respectively. Preferably such sample is a blood sample or effusions from inflamed tissues such as, e.g., the knee. In case of healthy subjects such samples may be taken at any time. In case of patients such samples are preferably taken prior, during and after the treatment. Such frequent sampling also allows for a staging of the disease as well as a monitoring and deciding whether the therapy used is actually effective. In case of patients who received high doses of myelotoxic chemotherapy or who undergo therapy with biologicals are most preferably taken when these patients are reconstituted in blood formation with leukocyte values around or above 1/nl. The isolated mononuclear cells are incubated with CD3 kappa for 1 to 6 days and tested for the ability of CD3 kappa to improve the function of leukocytes as described below. This diagnostic approach shows whether an immune defect is actually present which is treatable with CD3 kappa. In a further step, the comparison comprises the determination of the expression of the TCR. The expression of the TCR can be determined by various means, preferably on T-lymphocytes of the patient and healthy subject, respectively, and more particularly on the samples obtained there from. Among others, and not limited thereto, the expression can be determined by using compounds specifically interacting with the TCR. Such specifically interacting compounds are preferably selected from the group comprising antibodies, high affinity binding peptides, anticalines, aptamers and spiegelmers. For purpose the expression of the cytokines and chemokines, respectively, and the cytokine/chemokine receptors described herein as being related to or associated with the TCR expression, are analysed as well. This will show an improvement of function of leukocytes in general by bystander effects e.g. by secretion of factors or more specially of the herein described cytokines by the CD3 kappa modulated mononuclear cells. The expression of Cytokine/Chemokine-receptors and the expression of distinct Cytokines and/or Chemokines can be assessed on mononuclear cells. This expression analysis is preferably done by flow-cytometric analysis and leads to Mean-Fluorescence indices (MFI), which are direct proportional to the TCR or the Cytokine/Chemokine-receptor expression strength. The release of Cytokines and/or Chemokines can be determined by the use of specific antibodies which are labelled or which lead to the enzymatic generation of measurable products. Alternatively, the expression of the TCR, of the said other receptors or of the said cytokines can be determined by functional assays, whereby such functional assays preferably comprise the following steps: Cell culture of lymphocytes followed by peptide stimulation and analysis of cytokine expression with cytokine specific antibodies. Preferably, the expression between a patient and a healthy person is increased by a value of at least 10%, 20%, 50%, 100% or more. This increase depends on the basal TCR expression in the patient and might range from 20% in healthy individuals to 2500% in patients with severe compromised immune function after high doses of chemotherapy and therapy with biologicals. This percentage may refer as a measure to the number of T cell receptors present on a surface or the time an individual T cell receptor is available on such surface, whereby it is to be acknowledged that the time may be the average time of a group of T cell receptors or the average time of the T cell receptor on a group of lymphocytes, preferably the lymphocytes contained in the sample or a fraction thereof. More specifically, the incubation time is at least 4 hours to enable recycling of TCRs from various cellular compartments. The increase in the expression of the above named Cytokine/Chemokine-receptors and the said cytokines is analyzed in the same way. It will be understood by the ones skilled in the art that the samples are standardized in a preferred embodiment.

[0098] In a preferred embodiment, the difference in TCR expression between a patient population with MFIs below 22 and healthy subjects with a MFI around 115 is by a factor of 6, whereby such difference is preferably observed within 24 hours after in vitro culture and preferably lasts for at least two days, preferably at least four days and more preferably at least six days. The difference in the patients and the healthy subjects corresponds to the mean value of TCR expression of the healthy subjects plus five times the standard deviation, making the difference statistically highly significant. In a similar way, the CD4-receptor expression is different between a patient population and healthy subjects. However in the case of CD4, the difference is visible preferably after six days after in vitro culture.

[0099] Most patients with higher TCR expression as the patients described above show a MFI around 45 which correspond to a difference to the mean value of TCR expression of the healthy subjects plus three times the standard deviation and is still a statistically significant reduced TCR expression as compared to the healthy subjects. In a similar way as particularly described in the previous paragraph, the difference of TCR- and/or CD4-receptor expression is visible after in vitro culture as described this paragraph.

[0100] The present inventors have found that in the described patient populations the expression of the TCR in the T lymphocytes can be increased in a statistically significant manner by CD3 kappa and its derivatives to normal values as defined by healthy individuals. As will be outlined in more detail herein, such increase can be used for or is the basis of any treatment and/or prevention of diseases which are characterized by or associated with a decreased TCR level, preferably TCR level on the T lymphocytes. However also the expression of the said cytokines, more preferably of Th1-cytokines and most preferably of IFNγ can be increased in a statistically significant manner by CD3 kappa and its derivatives to normal values as defined by healthy individuals.

[0101] Preferably, the increase in TCR, CD4- and/or CD2-expression after CD3 k peptide treatment can be detected in an in vitro culture at peptide concentrations higher than 1-10 μg/ml, more preferably at concentrations of 10-100 μg/ml, even more preferably at concentrations of 100-500 μg/ml and most preferably at concentrations of 500-2000 μg/ml or even higher concentrations. The upregulation can be detected within 48 hours and is by at least a factor of 50%, more preferably at least 100% and even more preferably at least 200% as compared to the respective negative control. This expression analysis is preferably done by flow-cytometric analysis as described above. Alternatively, the expression of the TCR can be determined by functional assays, whereby such functional assays preferably comprise the following steps: Cell culture of lymphocytes followed by peptide stimulation and analysis of cytokine expression with cytokine specific antibodies. The expression of Cytokine/Chemokine-receptors and the expression of distinct Cytokines and/or Chemokines can be assessed on mononuclear cells in the same way. In another embodiment, the increase in TCR, CD4- and/or CD2-expression is by a factor of at least 2, preferably at least 4 and more preferably at least 6 fold, preferably each within 48 hours, whereby the respective lymphocytes used for the assessment from patients recovering from treatment with T-cell toxic chemotherapeutic agent, whereby preferably the agent is fludarabine and/or alemtuzumab. The increase in TCR, CD4- and/or CD2-expression described should preferably be shown at a concentration of 5-1000 μg/ml peptide versus no peptide or versus a control peptide with random sequence Most preferably the increase in TCR, CD4- and/or CD2-expression described should be show effect of 0.5-1 mg/ml CD3 kappa peptide versus no peptide or versus a control peptide with random sequence.

[0102] The term CD3 kappa or CD3 kappa peptide as used herein also comprises derivatives of the peptide having SEQ ID NO. 4, as obvious for the one skilled in the art. Insofar the term CD3 kappa peptide or CD 3 kappa peptides comprise, in a preferred embodiment of the present invention CD3 kappa having the amino acid according to SEQ.ID:No.4 and any derivative thereof, preferably any derivative as defined and/or disclosed herein. A derivative of CD3 kappa as preferably used herein is any peptide preferably having at least one of the characteristics of CD3 kappa having the amino acid sequence according to SEQ ID NO. 4. More specifically, such characteristic is any of the characteristics described herein for CD3 kappa and more preferably described for CD3 kappa having an amino acid sequence according to SEQ. ID. NO. 4. More preferably, such characteristic is the capability to increase the TCR, CD4- and/or CD2-expression within 24 hours by a factor of at least 25%, more preferably at least 50%, even more preferably at least 100% and most preferably 200%. Preferably, such increase in the TCR, CD4- and/or CD2-expression within 24 hours should be observable at peptide concentrations higher than 1-10 μg/ml, more preferably at concentrations of 10-100 μg/ml, even more preferably at concentrations of 100-500 μg/ml and most preferably at concentrations of 500-2000 μg/ml or even higher concentrations. One of the assays in principle useful to determine this or similar characteristics of CD3 kappa in general and the derivatives of CD3 kappa having the amino acid sequence according to SEQ ID NO.4 in particular, is described in the attached examples, whereby other or different assays are either known to the one skilled in the art or will be obvious for the one skilled in the art in the light of the present disclosure.

[0103] In principle, the derivatives of CD3 kappa and in particular of CD3 kappa having the amino acid sequence according to SEQ.ID.No.4 can be divided into the following groups: full-length derivatives, truncated derivatives and modified derivatives.

[0104] Full-length derivatives have the same length as the CD3 kappa peptide according to SEQ. ID. NO. 4 or comprise the complete amino acid sequence of CD3 kappa having the amino acid sequence according to SEQ.ID.No. 4. Full-length derivatives are characterized by one or several changes made to at least one or several amino acids forming the peptide. Such changes are preferably related to the side-chain of the amino acid. However, it is also within the present invention that a full-length derivative has the same sequence of side-chains but the backbone forming entities such as amino acids or derivatives thereof is changed, i.e. different from the peptide backbone obtained or observed when two or more amino acids are covalently linked to each other through a peptide bond whereby this kind of compound belongs to the group called peptidomimetics, which are formed e.g. through exchange of the amide-peptide-binding by urea resembling so called ‘ureidopeptides’ as shown by Barth BS, Myers AC and Lipton MA.: Exploring the stereochemical requirements for protease inhibition by ureidopeptides. J Pept Res. 2005 Mar;65(3):352-4; or through exchange of the amide-peptide-binding by thioamide-linkage yielding Endothiopeptides as shown by Yao S, Zutshi R and Chmielewski J.: Endothiopeptide inhibitors of HIV-1 protease. Bioorg Med Chem Lett. 1998 Mar. 17;8(6):699-704. Such non-peptide backbone can be present in the derivative either only for one building block or for several of the building blocks forming the derivative or, by reference to the CD3 kappa peptide having the amino acid sequence according to SEQ.ID.No.4, for one or several of the amino acids, including the complete backbone thereof This kind of modification is preferably used to reduce enzyme degradation in vivo or improve peptide binding which has been shown e.g. by Abdel-Rahman H M, Kimura T, Hidaka K, Kiso A, Nezami A, Freire E, Hayashi Y, Kiso Y.: Design of inhibitors against HIV, HTLV-I, and Plasmodium falciparum aspartic proteases. Biol Chem. 2004 Nov;385(11):1035-9.

[0105] The term full-length derivative also comprises derivatives which contain the full-length amino acid sequence of the CD3 kappa peptide according to SEQ.ID.No.4 and one or several further or additional amino acids, whereby such further amino acids are additionally or alternatively attached to the N-terminus or to the C-terminus. Furthermore, each of the further amino acid(s) can be attached to any of the side-chain of the amino acids and building blocks, respectively, forming the derivative of the CD3 kappa peptide according to SEQ.ID.No.4. It is also within the present invention that this kind of full-length derivatives comprises at one or several amino acid positions, relative to the amino acid sequence according to SEQ. ID. NO. 4, one or several amino acids or further building blocks incorporated into the amino acid sequence, more specifically, the backbone of the respective amino acid sequence, whereby the backbone is preferably a peptide backbone. Also, the full-length derivative is in an embodiment a modified derivative, preferably a modified derivative as defined herein. It is also within the present invention that the embodiments described in the present section are embodiments of the derivatives described in the preceding section.

[0106] The full-length derivatives of the CD3 kappa peptide comprising changes in the amino acid sequence relative to the sequence of CD3 kappa having the amino acid sequence according to SEQ.ID.No 4 at one or several positions, preferably without that such derivative lacks one of the characteristics of a CD3 kappa peptide as defined herein, are preferably characterized in that an amino acid of a distinct category is replaced by another amino acid of the same category. Such categories are preferably neutral amino acids, aliphatic amino acids, cationic amino acids, anionic amino acids, thiol-containing amino acids, aromatic amino acids and heterocyclic amino acids. As peptides may be obtained by protocols of organic synthesis, amino acid replacements are not limited to those of proteinogenic amino acids. Any building block including, but not limited to, non-proteinogenic amino acids, beta-amino acids, D-amino acids and L-amino acids or completely synthetic amino acids or amino acid like compounds like the transition state mimetic allophenylnorstatine that may be incorporated by suitable chemical procedures, may be included in the peptide.

[0107] To the extent the full-length derivatives of the CD3 kappa are generated by the exchange of one or several of the amino acids of the CD3 kappa peptide having the amino acid sequence according to SEQ. ID. NO. 4, the peptides having SEQ ID NO. 5-4417 are disclosed herein as exemplary full-length derivatives of the CD3 kappa peptide.

[0108] Truncated derivatives of the CD3 kappa peptide are peptides comprising a part of the amino acid sequence of the CD3 kappa peptide and its derivatives, in particular the full-length derivatives. In an embodiment the truncated derivative exhibit the changes described above for the full-length derivatives, whereby the overall length of the truncated derivative is shorter, at least by one amino acid or a building block compared to the CD3 kappa according to SEQ. ID. NO. 4 and the full-length derivatives, preferably the full-length derivatives described herein. In a further embodiment these truncated derivatives preferably comprise a core sequence of as little as 12 amino acids, preferably 18 amino acids and more preferably 25 amino acids. The sequence of this kind of truncated derivatives may start, in terms of N-terminal end, at the N-terminus or any other position relative to the full length sequence of CD3 kappa having the amino acid sequence according to SEQ ID NO. 4 or any of the full-length derivatives described herein.

[0109] To the extent the derivatives of the CD3 kappa are generated by truncating the amino acid sequence of CD3 kappa having the amino acid sequence according to SEQ.ID:No.4 and of the full length derivatives thereof, preferably as disclosed herein, the peptides having SEQ ID NO. 4418-4437 are disclosed herein as exemplary truncated derivatives thereof.

[0110] A modified derivative is any derivative of the CD3 kappa peptide having the amino acid sequence according to SEQ.ID.No.4, of any full-length derivative or of any truncated derivative exhibiting at least one further modifying group. Such modifying group can be present at or attached to the N-terminus, the C-terminus or any of the amino acids or building blocks, including any side chain thereof, forming the CD3 kappa peptide having the amino acid sequence according to SEQ.ID.No.4, any full-length derivative thereof or any truncated derivative thereof. In a preferred embodiment, the modifying group is different from an amino acid or any of the building blocks forming the CD3 kappa peptide having the amino acid sequence according to SEQ.ID.No.4, any full-length derivative thereof or any truncated derivative thereof. More preferably, the modifying group is selected from the group comprising acetate group, phosphor group and sugar group, more preferably glucose group. Most preferably the modifying sugar groups as N-acetyl-D-glucosamine or N-acetyl-D-galactosamine are attached to one or more serine residues at positions 1, 4 24, 29, 30, 32 38 and/or 39, and/or to the threonine residue at position 23, and/or to one or more asparagine residues at positions 20, 22 and/or 33. The modifying sugar groups include oligo- and polyglycans.

[0111] It is to be acknowledged by the one skilled in the art that in a preferred embodiment additionally or alternatively a peptide having homology of at least 80%, 85%, 90%, 95%, 96%, 97%, 98% or 99% compared to either the CD3 kappa peptide according to SEQ. ID. NO. 4, any full-length derivative thereof or any truncated derivative thereof shall be regarded as a derivative of CD3 kappa, preferably under the proviso that the derivative and/or the peptide to which is referred for the purpose of comparison, still exhibits at least one of the characteristics of the CD3 kappa peptide according to SEQ. ID. NO. 4.

[0112] In a preferred embodiment the CD3 kappa peptide further comprises a moiety which is suitable for detection. More specifically, such moiety allows for the detection of the peptide and/or any receptor interacting therewith. The moiety may be any group suitable for such purpose. Respective moieties are known to the one skilled in the art and comprise, however, are not limited to, fluorophors such as for example carboxyfluorescein or biotin. Preferably, the detection is caused by means of fluorescence. Alternatively, the detection may also occur by means of radioactivity, e. g. after incorporation of tritium, C-14, I-125 or S-35 by protocols known to the one skilled in the art. Detection may occur at the level of an individual cell, a tissue, an organ or an animal. Preferably the animal is a mammal and more preferably selected from the group comprising dog, cat, sheep, goat, rat, mouse, cow, horse and a human being. Detection may occur in vitro, in situ, in vivo, and/or ex vivo.

[0113] CD3 kappa peptide also comprises a moiety which is suitable for detection and/or determination of the molecular structure and/or of biochemical properties. Labelling might be done by incorporation of NMR-active isotopes, most preferably deuterium, C-13 or N-15.

[0114] In a further aspect, the present invention is related to a nucleic acid coding for the CD3 kappa peptide, i.e. the CD3 kappa peptide having the amino acid sequence according to SEQ.ID:No.4, any full-length derivative, any truncated derivative and any modified derivative also referred to herein in their entity as the CD3 kappa peptide or CD3 kappa peptides.

[0115] It will be acknowledged by the one skilled in the art that due to the genetic code, it is possible to perceive a nucleic acid sequence coding for the CD3 kappa peptides as disclosed herein. It is obvious that due to the degeneracy of the genetic code, different nucleic acid sequences coding for the same peptide are possible insofar. The preferred nucleic acid sequence for the new open reading frame is the one according to SEQ. ID. NO. 2 and the preferred nucleic acid coding for CD3 kappa having the amino acid sequence according to SEQ. ID. NO. 4, is the nucleic acid sequence according to SEQ ID NO. 3.

[0116] A further factor which can have an impact on the particular nucleic acid sequence and its design is based on the specific codon usage of the host organism which is used for the expression of the respective nucleic acid sequence. This is also known to the one skilled in the art and can be used for the design of a particular nucleic acid sequence coding for the CD3 kappa peptides as disclosed herein.

[0117] The nucleic acids according to the present invention also comprise sequences which are at least partially complementary to such nucleic acid sequences. Preferably, the nucleic acids are homologous to such nucleic acid sequence, whereby the homology is preferably at least 80%, 85%, 90%, 95%, 96%, 97%, 98% or 99%, respectively.

[0118] Also, the nucleic acid sequences according to the present invention comprise those which hybridize to any of the nucleic acid sequences disclosed herein. Preferably, the hybridization occurs under conditions of high stringency as, for example, described in Southern, E. M. (1975) J. Mol. Biol. 98, 503-517.

[0119] Also, the nucleic acid sequences according to the present invention comprise those which, but for the degeneracy of the genetic code, would hybridize to any of the afore-defined nucleic acid sequences. Preferably the hybridization conditions are conditions of high stringency as, for example a hybridization solution consisting of 1.5× SSPE (0.27 M NaCl, 15 mM sodium

[0120] phosphate (pH 7.7), 1.5 mM EDTA), 0.5% (w/v) non-fat powdered milk; 14), and 1% (w/v) SDS with hybridization carried out at 68° C. for up to 20 h, as described in Khandjian, E. W. (1987) Biotechnology 5, 165-167 or Reed, K. C. and Mann, D. A. (1985) Nucl. Acids Res. 13, 7207-7221.

[0121] The nucleic acids according to the present invention such as specifically those disclosed herein may be present in an isolated form, as RNA, as DNA or as hybrids thereof. Preferably, the nucleic acid sequences according to the present invention are contained in a vector. Such a vector is preferably a plasmid vector or a viral vector, however, not limited thereto. A vector as preferably used herein is a nucleic acid sequence which is suitable to express a nucleic acid cloned into it. Preferably such vector comprises a sequence which allows the vector to preferably stably replicate in a host organism and to express the nucleic acid sequence encoded by said vector. Preferably the expression is controlled by a promoter and optionally other expression-regulating factors and sequences, respectively. Vectors are most preferably expression vectors which are known to the one skilled in the art. Depending on the host organism where such vector shall be used and expressed, respectively, the vector can be a mammalian vector, an insect vector, a microbial vector and a viral vector, respectively. This includes also transfection with RNA e.g. of dendritic cells as described in Gilboa E, Vieweg J. Cancer immunotherapy with mRNA-transfected dendritic cells. Immunol Rev. 2004 June;199:251-63.

[0122] Examples of a possible mammalian vector include pCMV4 as described by Andersson, S., Davis, D. L., Dahlback, H., Jornvall, H., Russell, D. W.: Cloning, structure, and expression of the mitochondrial cytochrome P-450 sterol 26-hydroxylase, a bile acid biosynthetic enzyme. J Biol Chem. 1989 May 15;264(14):8222-9 or an insect vector like a baculovirus which can be either used to transfect insect cell for recombinant protein production or used to transfer genetic material into mammalian cells, as described in Hu Y C. Baculovirus as a highly efficient expression vector in insect and mammalian cells. Acta Pharmacol Sin. 2005 April;26(4):405-16 or in Tani H, Limn C K, Yap C C, Onishi M, Nozaki M, Nishimune Y, Okahashi N, Kitagawa Y, Watanabe R, Mochizuki R, Moriishi K, Matsuura Y. In vitro and in vivo gene delivery by recombinant baculoviruses. J Virol. 2003 Sep;77(18):9799-808.

[0123] Examples of possible microbial vectors are pUC18, pUC19, pBluescript or pBR322 as described in Sambrook, J., Fritsch, E. F., and Maniatis, T. (1989). Molecular Cloning: A Laboratory Manual, Second Edition (Plainview, New York: Cold Spring Harbor Laboratory Press) or in Ausubel, F. M., Brent, R., Kingston, R. E., Moore, D. D., Seidman, J. G., Smith, J. A., and Struhl, K. (1994). Current Protocols in Molecular Biology (New York: Greene Publishing Associates and Wiley-Interscience).

[0124] Preferred viral vectors are retroviral vectors like pLN, pLXSN, pLNCX, pLNSX, pLNL6, pLXSHD, pLHDCX or pLXSH as described in Coffin, J. M. & Varmus, H. E., Eds. (1996) Retroviruses (Cold Spring Harbor Laboratory Press, NY), adenoviral vectors like pAdTrack-CMV, pAdTrack or pShuttle-CMV as described in He T C, Zhou S, da Costa LT, Yu J, Kinzler K W, Vogelstein B. A simplified system for generating recombinant adenoviruses. Proc Natl Acad Sci U S A. 1998 Mar. 3;95(5):2509-14 or adeno-associated virus vectors for gene transfer into mammalian cells as described in Zolotukhin S. Production of recombinant adeno-associated virus vectors. Hum Gene Ther. 2005 May;16(5):551-7.

[0125] In a further aspect, the present invention is related to a host cell comprising either a nucleic acid according to the present invention or a vector according to the present invention. Preferably, the host cell is an animal cell and more preferably a mammalian cell. However, the host cell may also be a microbial cell, both a prokaryotic cell and a eukaryotic cell such as a yeast cell or an insect cell.

[0126] In case the cell is a mammalian cell and more particularly a human cell, such cell is preferably an isolated human cell. Most preferably the cell is a cell of hematopoetic origin.

[0127] It will be appreciated by the one skilled in the art that once such a nucleic acid, vector and host cell, respectively, in accordance with the present invention, is available, the respective peptide can be synthesised using an expression system. Preferably a respective host cell is cultivated in a medium under conditions which allow the production of the peptide encoded by the nucleic acid sequence which is preferably exogenously introduced into said cell. Subsequently, the peptide is harvested, whereby such harvest can be from the culture supernatant or from the cellular cytoplasm upon disrupting the host cell.

[0128] Any such vectors, host cells and other elements described herein are as such known to the one skilled in the art and are, for example, described in Sambrook, J., Fritsch, E. F., and Maniatis, T. (1989). Molecular Cloning: A Laboratory Manual, Second Edition (Plainview, New York: Cold Spring Harbor Laboratory Press) or in Ausubel, F. M., Brent, R., Kingston, R. E., Moore, D. D., Seidman, J. G., Smith, J. A., and Struhl, K. (1994). Current Protocols in Molecular Biology (New York: Greene Publishing Associates and Wiley-Interscience) which is incorporated herein by reference.

[0129] As disclosed herein, the CD3 kappa peptides improve the surface expression of the T cell receptor, of CD4, CD2, and of some Chemokine and Cytokine-Receptors, more specifically of Cytokine/Chemokine-Receptors which lead to antiapoptotic and/or proliferation inducing effects and have thus an effect which is supportive to the TCR related effects described herein. Most specifically CD3 kappa leads to an up-regulation of CD25, CD116, CD127, CCR3, CCR9 and CXCR1. CD3 kappa also leads to a slight up-regulation of CXCR3 and CXCR4. Based thereon, in principle, any disease involving the T cell receptor and accordingly any disease involving reduced T cell function and/or reduced survival of T-lymphocytes can be treated or prevented by influencing, either directly or indirectly, the CD3 kappa peptide mediated improved surface expression of TCR and of the antiapoptotic and/or proliferation inducing receptors specified herein. Therefore, the diseases for the prevention and/or treatment of which the CD3 kappa peptides and the nucleic acids coding therefor as well as any other of the CD3 kappa peptide related compounds which are described and disclosed herein, can be specifically used are immune-related diseases. Immune-related diseases as preferably used herein are diseases which are characterized by the TCR, the anti-apoptotic and/or proliferation inducing receptors specified herein, and/or the cytokines specified herein which are involved in the pathogenetic mechanism, whereby such pathogenetic mechanism allows that by modifying the surface expression of the T cell receptor to prevent, ameliorate, relieve or cure such disease, either directly or indirectly via the other receptors and cytokines, respectively, specified herein.

[0130] To the extent that a disease is characterized by an, in the broader sense, insufficient T cell receptor expression, the CD3 kappa peptides and the nucleic acid coding therefor, can be used for the treatment and prevention, respectively, of such disease. As preferably used herein, the term insufficient T cell receptor expression refers to a level of expression which gives rise to, is linked to or is associated with a pathological condition which is the respective disease, a pre-stage thereof or which increases the susceptibility of a subject for such disease. More specifically, the diseases for the treatment and prevention of which CD3 kappa peptides and the nucleic acids coding therefor, can preferably be used are HIV/Aids, immune defect after treatment with chemotherapy, such as, treatment with a nucleoside-analogue like fludarabine, cytarabine, gemcitabine; an alkylating agent like cyclophosphomide, melphalan, BCNU; an antibody like Alemtuzumab; an anthracycline like doxorubicin, daunorubicin or idarubicine; or radiation; enhancement of the function of ex vivo or in vitro generated T cells for, e.g. adoptive T cell therapy; common variable immunodeficiency, severe combined immunodeficiencies, treatment of cancer, augmentation of cellular immunity and treatment of infections. Most specifically, patients with a lower TCR expression are defined by a difference to the mean value of TCR expression of the healthy subjects plus three times the standard deviation which is statistically significant reduced TCR expression.

[0131] Additionally, the diseases may be autoimmune disorders which can be treated via stimulation of regulatory T cells, whereby the autoimmune diseases are particularly those disclosed herein, more specifically those disclosed which can be treated and prevented, respectively, by using the CD3 kappa peptide related compounds. Without wishing to be bound by any theory such kind of diseases can be treated and/or prevented by reducing the effect of the CD3 kappa peptide the abundant titre of which is characteristic for this kind of diseases.

[0132] In principle, the treatment and/or prevention of each and any infection is an infectious disease caused or associated with one or several of the viruses and organisms, respectively, recited in table 1. Most preferably CD3 kappa peptides are used as adjuvants for vaccines for the treatment and/or prevention of such diseases or for the treatment and/or prevention of chronic and/or probably lethal forms of such diseases.

TABLE 1
Infectious diseases which can be treated in accordance with the present
invention

| | | | | | |
|---|---|---|---|---|---|
| 1. | Human immundefiency virus | - | H10N4 subtype | - | H12N8 subtype |
| | 1-Infection | - | H10N5 subtype | - | H13N2 subtype |
| 2. | Human immundefiency virus | - | H10N7 subtype | - | H13N3 subtype |
| | 2-Infection | - | H10N8 subtype | - | H13N6 subtype |
| 3. | Human immundefiency virus | - | H10N9 subtype | - | H13N7 subtype |
| | 3-Infection | - | H11N1 subtype | - | H14N5 subtype |
| 4. | Human T-cell lymphotropic | - | H11N13 subtype | - | H14N6 subtype |
| | virus | - | H11N2 subtype | - | H15N8 subtype |
| 5. | Hepatitis A Virus-Infection | - | H11N4 subtype | - | H15N9 subtype |
| 6. | Hepatitis B Virus-Infection | - | H11N6 subtype | - | H16N3 subtype |
| 7. | Hepatitis C Virus-Infection | - | H11N8 subtype | - | H1N1 subtype |
| 8. | Hepatitis D Virus-Infection | - | H11N9 subtype | - | H1N2 subtype |
| 9. | Hepatitis E Virus-Infection | - | H12N1 subtype | - | H1N3 subtype |
| 10. | Hepatitis G Virus-Infection | - | H12N4 subtype | - | H1N6 subtype |
| 11. | Influenza A Virus-Infection | - | H12N5 subtype | - | H1N9 subtype |
| - | H2N1 subtype | - | H7N5 subtype | - | SARS coronavirus A022 |
| - | H2N2 subtype | - | H7N7 subtype | - | SARS coronavirus A030 |
| - | H2N3 subtype | - | H7N8 subtype | - | SARS coronavirus A031 |
| - | H2N5 subtype | - | H8N4 subtype | - | SARS coronavirus AS |
| - | H2N7 subtype | - | H8N5 subtype | - | SARS coronavirus B012 |
| - | H2N8 subtype | - | H9N1 subtype | - | SARS coronavirus B024 |
| - | H2N9 subtype | - | H9N2 subtype | - | SARS coronavirus B029 |
| - | H3N1 subtype | - | H9N3 subtype | - | SARS coronavirus B033 |
| - | H3N2 subtype | - | H9N5 subtype | - | SARS coronavirus B039 |
| - | H3N3 subtype | - | H9N6 subtype | - | SARS coronavirus B040 |
| - | H3N4 subtype | - | H9N7 subtype | - | SARS coronavirus BJ01 |
| - | H3N5 subtype | - | H9N8 subtype | - | SARS coronavirus BJ02 |
| - | H3N6 subtype | - | H9N9 subtype | - | SARS coronavirus BJ03 |
| - | H3N8 subtype | 12. | Influenza B Virus-Infection | - | SARS coronavirus BJ04 |
| - | H4N1 subtype | 13. | Influenza C Virus-Infection | - | SARS coronavirus BJ2232 |
| - | H4N2 subtype | 14. | Human astrovirus | - | SARS coronavirus BJ302 |
| - | H4N3 subtype | 15. | Human norovirus | - | SARS coronavirus C013 |
| - | H4N4 subtype | 16. | Human calicivirus | - | SARS coronavirus C014 |
| - | H4N5 subtype | 17. | Dengue virus group | - | SARS coronavirus C017 |
| - | H4N6 subtype | 18. | Japanese encephalitis virus | - | SARS coronavirus C018 |
| - | H4N8 subtype | | group | - | SARS coronavirus C019 |
| - | H4N9 subtype | 19. | Kokobera virus group | - | SARS coronavirus C025 |
| - | H5N1 subtype | 20. | Modoc virus group | - | SARS coronavirus C028 |
| - | H5N2 subtype | 21. | mosquito-borne viruses | - | SARS coronavirus C029 |
| - | H5N3 subtype | 22. | Ntaya virus group | - | SARS Coronavirus |
| - | H5N4 subtype | 23. | Rio Bravo virus group | | CDC#200301157 |
| - | H5N6 subtype | 24. | Seaborne tick-borne virus | - | SARS coronavirus civet007 |
| - | H5N7 subtype | | group | - | SARS coronavirus civet010 |
| - | H5N8 subtype | 25. | Spondweni virus group | - | SARS coronavirus civet014 |
| - | H5N9 subtype | 26. | tick-borne encephalitis virus | - | SARS coronavirus civet019 |
| - | H6N1 subtype | | group | - | SARS coronavirus civet020 |
| - | H6N2 subtype | 27. | Yaounde virus | - | SARS coronavirus CUHK- |
| - | H6N4 subtype | 28. | Yellow fever virus group | | AG01 |
| - | H6N5 subtype | 29. | GB virus A | - | SARS coronavirus CUHK- |
| - | H6N6 subtype | 30. | GBV-C/HGV group | | AG02 |
| - | H6N7 subtype | 31. | Hepatitis GB virus B | - | SARS coronavirus CUHK- |
| - | H6N8 subtype | 32. | Marmoset hepatitis GB virus A | | AG03 |
| - | H6N9 subtype | 33. | Human coronavirus | - | SARS coronavirus CUHK-L2 |
| - | H7N1 subtype | - | SARS coronavirus A001 | - | SARS coronavirus CUHK- |
| - | H7N2 subtype | - | SARS coronavirus A013 | | Su10 |
| - | H7N3 subtype | - | SARS coronavirus A021 | - | SARS coronavirus CUHK-W1 |
| - | SARS coronavirus cw037 | - | SARS coronavirus HPZ-2003 | - | SARS coronavirus Shanhgai |
| - | SARS coronavirus cw049 | - | SARS coronavirus HSR 1 | | LY |
| - | SARS coronavirus FRA | - | SARS coronavirus HSZ-A | - | SARS coronavirus Sin0409 |
| - | SARS coronavirus Frankfurt | - | SARS coronavirus HSZ-Bb | - | SARS coronavirus Sin2500 |
| - | 1 | - | SARS coronavirus HSZ-Bc | - | SARS coronavirus Sin2677 |
| - | SARS coronavirus GD01 | - | SARS coronavirus HSZ-Cb | - | SARS coronavirus Sin2679 |
| - | SARS coronavirus | - | SARS coronavirus HSZ-Cc | - | SARS coronavirus Sin2748 |
| | GD03T0013 | - | SARS coronavirus HSZ2-A | - | SARS coronavirus Sin2774 |
| - | SARS coronavirus GD322 | - | SARS coronavirus HZS2-Bb | - | SARS coronavirus Sin3408 |
| - | SARS coronavirus GD69 | - | SARS coronavirus HZS2-C | - | SARS coronavirus Sin3408L |
| - | SARS coronavirus GZ-A | - | SARS coronavirus HZS2-D | - | SARS coronavirus Sin3725V |
| - | SARS coronavirus GZ-B | - | SARS coronavirus HZS2-E | - | SARS coronavirus Sin3765V |
| - | SARS coronavirus GZ-C | - | SARS coronavirus HZS2-Fb | - | SARS coronavirus Sin842 |
| - | SARS coronavirus GZ-D | - | SARS coronavirus HZS2-Fc | - | SARS coronavirus Sin845 |
| - | SARS coronavirus GZ02 | - | SARS coronavirus JMD | - | SARS coronavirus Sin846 |
| - | SARS coronavirus GZ0401 | - | SARS coronavirus LC1 | - | SARS coronavirus Sin847 |
| - | SARS coronavirus GZ0402 | - | SARS coronavirus LC2 | - | SARS coronavirus Sin848 |
| - | SARS coronavirus GZ0403 | - | SARS coronavirus LC3 | - | SARS coronavirus Sin849 |
| - | SARS coronavirus GZ43 | - | SARS coronavirus LC4 | - | SARS coronavirus Sin850 |
| - | SARS coronavirus GZ50 | - | SARS coronavirus LC5 | - | SARS coronavirus Sin852 |
| - | SARS coronavirus GZ60 | - | SARS coronavirus LLJ-2004 | - | SARS coronavirus Sin_WNV |
| - | SARS coronavirus HB | - | SARS coronavirus NS-1 | - | SARS coronavirus Sino1-11 |
| - | SARS coronavirus | - | SARS coronavirus PC4-115 | - | SARS coronavirus Sino3-11 |
| | HC/SZ/61/03 | - | SARS coronavirus PC4-127 | - | SARS coronavirus SinP1 |
| - | SARS coronavirus HGZ8L1- | - | SARS coronavirus PC4-13 | - | SARS coronavirus SinP2 |
| | A | - | SARS coronavirus PC4-136 | - | SARS coronavirus SinP3 |
| - | SARS coronavirus HGZ8L1- | - | SARS coronavirus PC4-137 | - | SARS coronavirus SinP4 |
| | B | - | SARS coronavirus PC4-145 | - | SARS coronavirus SinP5 |
| - | SARS coronavirus HGZ8L2 | - | SARS coronavirus PC4-199 | - | SARS coronavirus SoD |
| - | SARS coronavirus HHS- | - | SARS coronavirus PC4-205 | - | SARS coronavirus SZ1 |
| | 2004 | - | SARS coronavirus PC4-227 | - | SARS coronavirus SZ13 |
| - | SARS coronavirus HKU- | - | SARS coronavirus PC4-241 | - | SARS coronavirus SZ16 |
| | 36871 | - | SARS coronavirus PUMC01 | - | SARS coronavirus SZ3 |
| - | SARS coronavirus HKU- | - | SARS coronavirus PUMC02 | - | SARS coronavirus Taiwan |
| | 39849 | - | SARS coronavirus PUMC03 | - | SARS coronavirus Taiwan JC- |
| - | SARS coronavirus HKU- | - | SARS coronavirus sf098 | | 2003 |
| | 65806 | - | SARS coronavirus sf099 | - | SARS coronavirus Taiwan TC1 |
| - | SARS coronavirus HKU- | - | SARS coronavirus | - | SARS coronavirus Taiwan TC2 |
| | 66078 | - | ShanghaiQXC1 | - | SARS coronavirus Taiwan TC3 |
| - | SARS coronavirus Hong | - | SARS coronavirus | - | SARS coronavirus TJF |
| | Kong/03/2003 | | ShanghaiQXC2 | - | SARS coronavirus Tor2 |
| - | SARS coronavirus TW | - | SARS coronavirus WHU | 65. | Human coxsackievirus B6 |
| - | SARS coronavirus TW-GD1 | - | SARS coronavirus xw002 | 66. | Human echovirus 1 |
| - | SARS coronavirus TW-GD2 | - | SARS coronavirus ZJ01 | 67. | Human echovirus 11 |
| - | SARS coronavirus TW-GD3 | - | SARS coronavirus ZJ02 | 68. | Human echovirus 12 |
| - | SARS coronavirus TW-GD4 | - | SARS coronavirus ZJ0301 | 69. | Human echovirus 13 |
| - | SARS coronavirus TW-GD5 | - | SARS coronavirus ZMY 1 | 70. | Human echovirus 14 |
| - | SARS coronavirus TW-HP1 | - | SARS coronavirus ZS-A | 71. | Human echovirus 15 |
| - | SARS coronavirus TW-HP2 | - | SARS coronavirus ZS-B | 72. | Human echovirus 16 |
| - | SARS coronavirus TW-HP3 | - | SARS coronavirus ZS-C | 73. | Human echovirus 17 |
| - | SARS coronavirus TW-HP4 | 34. | Theiler's encephalomyelitis | 74. | Human echovirus 18 |
| - | SARS coronavirus TW-JC2 | | virus | 75. | Human echovirus 19 |
| - | SARS coronavirus TW-KC1 | 35. | Human enterovirus A | 76. | Human echovirus 2 |
| - | SARS coronavirus TW-KC3 | 36. | Enterovirus 5666/sin/002209 | 77. | Human echovirus 20 |
| - | SARS coronavirus TW-PH1 | 37. | Enterovirus 5865/sin/000009 | 78. | Human echovirus 21 |
| - | SARS coronavirus TW-PH2 | 38. | Human coxsackievirus A10 | 79. | Human echovirus 24 |
| - | SARS coronavirus TW-YM1 | 39. | Human coxsackievirus A12 | 80. | Human echovirus 25 |
| - | SARS coronavirus TW-YM2 | 40. | Human coxsackievirus A14 | 81. | Human echovirus 26 |
| - | SARS coronavirus TW-YM3 | 41. | Human coxsackievirus A16 | 82. | Human echovirus 27 |
| - | SARS coronavirus TW-YM4 | 42. | Human coxsackievirus A2 | 83. | Human echovirus 29 |
| - | SARS coronavirus TW1 | 43. | Human coxsackievirus A3 | 84. | Human echovirus 3 |
| - | SARS coronavirus TW10 | 44. | Human coxsackievirus A4 | 85. | Human echovirus 30 |
| - | SARS coronavirus TW11 | 45. | Human coxsackievirus A5 | 86. | Human echovirus 31 |
| - | SARS coronavirus TW2 | 46. | Human coxsackievirus A6 | 87. | Human echovirus 32 |
| - | SARS coronavirus TW3 | 47. | Human coxsackievirus A7 | 88. | Human echovirus 33 |
| - | SARS coronavirus TW4 | 48. | Human coxsackievirus A8 | 89. | Human echovirus 4 |
| - | SARS coronavirus TW5 | 49. | Human enterovirus 71 | 90. | Human echovirus 5 |
| - | SARS coronavirus TW6 | 50. | Human enterovirus 76 | 91. | Human echovirus 6 |
| - | SARS coronavirus TW7 | 51. | Human enterovirus 89 | 92. | Human echovirus 7 |
| - | SARS coronavirus TW8 | 52. | Human enterovirus 90 | 93. | Human echovirus 8 |
| - | SARS coronavirus TW9 | 53. | Human enterovirus 91 | 94. | Human echovirus 9 |
| - | SARS coronavirus TWC | 54. | Human enterovirus B | 95. | Human enterovirus 69 |
| - | SARS coronavirus TWC2 | 55. | Enterovirus 69 | 96. | Human enterovirus 73 |
| - | SARS coronavirus TWC3 | 56. | Enterovirus 74 | 97. | Human enterovirus 74 |
| - | SARS coronavirus TWH | 57. | Enterovirus CA55-1988 | 98. | Human enterovirus 75 |
| - | SARS coronavirus TWJ | 58. | Enterovirus Yanbian 96-83csf | 99. | Human enterovirus 77 |
| - | SARS coronavirus TWK | 59. | Human coxsackievirus A9 | 100. | Human enterovirus 78 |
| - | SARS coronavirus TWS | 60. | Human coxsackievirus B1 | 101. | Swine vesicular disease virus |
| - | SARS coronavirus TWY | 61. | Human coxsackievirus B2 | 102. | Human enterovirus C |
| - | SARS coronavirus Urbani | 62. | Human coxsackievirus B3 | 103. | Human coxsackievirus A1 |
| - | SARS coronavirus Vietnam | 63. | Human coxsackievirus B4 | 104. | Human coxsackievirus A11 |
| - | SARS coronavirus WH20 | 64. | Human coxsackievirus B5 | 105. | Human coxsackievirus A13 |
| 106. | Human coxsackievirus A15 | 147. | Human rhinovirus 31 | 188. | Human rhinovirus 8 |
| 107. | Human coxsackievirus A11 | 148. | Human rhinovirus 32 | 189. | Human rhinovirus 80 |
| 108. | Human coxsackievirus A18 | 149. | Human rhinovirus 33 | 190. | Human rhinovirus 81 |
| 109. | Human coxsackievirus A19 | 150. | Human rhinovirus 34 | 191. | Human rhinovirus 82 |
| 110. | Human coxsackievirus A20 | 151. | Human rhinovirus 36 | 192. | Human rhinovirus 85 |
| 111. | Human coxsackievirus A21 | 152. | Human rhinovirus 38 | 193. | Human rhinovirus 88 |
| 112. | Human coxsackievirus A22 | 153. | Human rhinovirus 39 | 194. | Human rhinovirus 89 |
| 113. | Human coxsackievirus A24 | 154. | Human rhinovirus 40 | 195. | Human rhinovirus 9 |
| 114. | Human enterovirus D | 155. | Human rhinovirus 41 | 196. | Human rhinovirus 90 |
| 115. | Human enterovirus 68 | 156. | Human rhinovirus 43 | 197. | Human rhinovirus 94 |
| 116. | Human enterovirus 70 | 157. | Human rhinovirus 44 | 198. | Human rhinovirus 95 |
| 117. | Poliovirus | 158. | Human rhinovirus 45 | 199. | Human rhinovirus 96 |
| 118. | Human poliovirus 1 | 159. | Human rhinovirus 46 | 200. | Human rhinovirus 98 |
| 119. | Human poliovirus 2 | 160. | Human rhinovirus 47 | 201. | Human rhinovirus B |
| 120. | Human poliovirus 3 | 161. | Human rhinovirus 49 | 202. | Human rhinovirus 14 |
| 121. | Wild poliovirus type 3 | 162. | Human rhinovirus 50 | 203. | Human rhinovirus 17 |
| 122. | Human parechovirus 1 | 163. | Human rhinovirus 51 | 204. | Human rhinovirus 26 |
| 123. | Human parechovirus 2 | 164. | Human rhinovirus 53 | 205. | Human rhinovirus 27 |
| 124. | Human parechovirus 3 | 165. | Human rhinovirus 54 | 206. | Human rhinovirus 3 |
| 125. | Human rhinovirus A | 166. | Human rhinovirus 55 | 207. | Human rhinovirus 35 |
| 126. | Human rhinovirus 10 | 167. | Human rhinovirus 56 | 208. | Human rhinovirus 37 |
| 127. | Human rhinovirus 100 | 168. | Human rhinovirus 57 | 209. | Human rhinovirus 4 |
| 128. | Human rhinovirus 11 | 169. | Human rhinovirus 58 | 210. | Human rhinovirus 42 |
| 129. | Human rhinovirus 12 | 170. | Human rhinovirus 59 | 211. | Human rhinovirus 48 |
| 130. | Human rhinovirus 13 | 171. | Human rhinovirus 60 | 212. | Human rhinovirus 5 |
| 131. | Human rhinovirus 15 | 172. | Human rhinovirus 61 | 213. | Human rhinovirus 52 |
| 132. | Human rhinovirus 16 | 173. | Human rhinovirus 62 | 214. | Human rhinovirus 6 |
| 133. | Human rhinovirus 18 | 174. | Human rhinovirus 63 | 215. | Human rhinovirus 69 |
| 134. | Human rhinovirus 19 | 175. | Human rhinovirus 64 | 216. | Human rhinovirus 70 |
| 135. | Human rhinovirus 1A | 176. | Human rhinovirus 65 | 217. | Human rhinovirus 72 |
| 136. | Human rhinovirus 1B | 177. | Human rhinovirus 66 | 218. | Human rhinovirus 79 |
| 137. | Human rhinovirus 2 | 178. | Human rhinovirus 67 | 219. | Human rhinovirus 83 |
| 138. | Human rhinovirus 20 | 179. | Human rhinovirus 68 | 220. | Human rhinovirus 84 |
| 139. | Human rhinovirus 21 | 180. | Human rhinovirus 7 | 221. | Human rhinovirus 86 |
| 140. | Human rhinovirus 22 | 181. | Human rhinovirus 71 | 222. | Human rhinovirus 91 |
| 141. | Human rhinovirus 23 | 182. | Human rhinovirus 73 | 223. | Human rhinovirus 92 |
| 142. | Human rhinovirus 24 | 183. | Human rhinovirus 74 | 224. | Human rhinovirus 93 |
| 143. | Human rhinovirus 25 | 184. | Human rhinovirus 75 | 225. | Human rhinovirus 97 |
| 144. | Human rhinovirus 28 | 185. | Human rhinovirus 76 | 226. | Human rhinovirus 99 |
| 145. | Human rhinovirus 29 | 186. | Human rhinovirus 77 | 227. | Human rhinovirus 001 Finland |
| 146. | Human rhinovirus 30 | 187. | Human rhinovirus 78 | | Nov1995 |
| 228. | Human rhinovirus 166 | 248. | Human herpesvirus 7-Infection | 283. | Human papillomavirus type 26 |
| | Finland Sep1995 | 249. | Human herpesvirus 8 (Kaposi's | 284. | Human papillomavirus type 51 |
| 229. | Human rhinovirus 253 | | sarcoma-associated | 285. | Human papillomavirus type 69 |
| | Finland Sep1994 | | herpesvirus)-Infection | 286. | Human papillomavirus type 82 |
| 230. | Human rhinovirus 263 Berlin | 250. | Human papillomavirus-10 | 287. | Human papillomavirus-32 |
| | 2004 | 251. | Human papillomavirus type 10 | 288. | Human papillomavirus type 32 |
| 231. | Human rhinovirus 317 | 252. | Human papillomavirus type 28 | 289. | Human papillomavirus type 42 |
| | Finland Aug1996 | 253. | Human papillomavirus type 29 | 290. | Human papillomavirus-34 |
| 232. | Human rhinovirus 425 | 254. | Human papillomavirus type 3 | 291. | Human papillomavirus type 34 |
| | Finland Dec1995 | 255. | Human papillomavirus type 77 | 292. | Human papillomavirus type 73 |
| 233. | Human rhinovirus 851 | 256. | Human papillomavirus type 94 | 293. | Human papillomavirus-53 |
| | Finland Sep1996 | 257. | Human papillomavirus-16 | 294. | Human papillomavirus type 30 |
| 234. | Human rhinovirus 864 | 258. | Human papillomavirus type 16 | 295. | Human papillomavirus type 53 |
| | Finland Sep1996 | 259. | Human papillomavirus type 31 | 296. | Human papillomavirus type 56 |
| 235. | Human rhinovirus 928 | 260. | Human papillomavirus type 33 | 297. | Human papillomavirus type 66 |
| | Finland May1995 | 261. | Human papillomavirus type 35 | 298. | Human papillomavirus-54 |
| 236. | Human rhinovirus strain | 262. | Human papillomavirus type | 299. | Human papillomavirus-6 |
| | Hanks | | 35H | 300. | Human papillomavirus type 11 |
| 237. | Untyped human rhinovirus | 263. | Human papillomavirus type 52 | 301. | Human papillomavirus type 13 |
| | OK88-8162 | 264. | Human papillomavirus type 58 | 302. | Human papillomavirus type 44 |
| 238. | Rubella virus | 265. | Human papillomavirus type 67 | 303. | Human papillomavirus type 55 |
| 239. | | 266. | Human papillomavirus-18 | 304. | Human papillomavirus type 6 |
| 240. | Human respiratory syncytial | 267. | Human papillomavirus- | 305. | Human papillomavirus type 6a |
| | virus A | | cand85 | 306. | Human papillomavirus type 6b |
| 241. | Human respiratory syncytial | 268. | Human papillomavirus type 18 | 307. | Human papillomavirus type 6c |
| | virus B | 269. | Human papillomavirus type 39 | 308. | Human papillomavirus type 6e |
| 242. | Human herpesvirus 1 | 270. | Human papillomavirus type 45 | 309. | Human papillomavirus type |
| | (Herpes simplex)-Infection | 271. | Human papillomavirus type 59 | | 6vc |
| 243. | Human herpesvirus 2- | 272. | Human papillomavirus type 68 | 310. | Human papillomavirus type 74 |
| | Infection | 273. | Human papillomavirus type 70 | 311. | Pygmy chimpanzee |
| 244. | Human herpesvirus 3 | 274. | Human papillomavirus-2 | | papillomavirus type 1 |
| | (Varicella-zoster virus)- | 275. | Human papillomavirus type 2 | 312. | Human papillomavirus - 61 |
| | Infection | 276. | Human papillomavirus type 27 | 313. | Human papillomavirus - 72 |
| 245. | Human herpesvirus 4 | 277. | Human papillomavirus type | 314. | Human papillomavirus - 81 |
| | (Epstein-Barr virus)- | | 27b | 315. | Human papillomavirus - 83 |
| | Infection | 278. | Human papillomavirus type 2a | 316. | Human papillomavirus- |
| 246. | Human herpesvirus 5 | 279. | Human papillomavirus type 2c | | cand62 |
| | (Cytomegalovirus)-Infection | 280. | Human papillomavirus type 57 | 317. | Human papillomavirus- |
| 247. | Human herpesvirus 6- | 281. | Human papillomavirus type | | cand86 |
| | Infection | | 57b | 318. | Human papillomavirus- |
| | | 282. | Human papillomavirus-26 | | cand87 |
| 319. | Human papillomavirus- | 341. | Human papillomavirus type 25 | 378. | Human papillomavirus |
| | cand89 | 342. | Human papillomavirus type 36 | | HANOA464 |
| 320. | Human papillomavirus type | 343. | Human papillomavirus type 47 | 379. | Human papillomavirus RTRX7 |
| | 61 | 344. | Human papillomavirus type 5 | 380. | Human papillomavirus type 24 |
| 321. | Human papillomavirus type | 345. | Human papillomavirus type 5b | 381. | Human papillomavirus type 64 |
| | 84 | 346. | Human papillomavirus type 8 | 382. | Human papillomavirus type |
| 322. | Human papillomavirus-7 | 347. | Human papillomavirus type 93 | | JC9710 |
| 323. | Human papillomavirus- | 348. | Human papillomavirus-9 | 383. | Human papillomavirus type |
| | cand91 | 349. | Human papillomavirus type 15 | | JC9813 |
| 324. | Human papillomavirus type | 350. | Human papillomavirus type 17 | 384. | Human papillomavirus type |
| | 40 | 351. | Human papillomavirus type 22 | | JEB2 |
| 325. | Human papillomavirus type | 352. | Human papillomavirus type 23 | 385. | Human papillomavirus type |
| | 43 | 353. | Human papillomavirus type 37 | | me180 |
| 326. | Human papillomavirus type | 354. | Human papillomavirus type 38 | 386. | Human papillomavirus type Xc |
| | 7 | 355. | Human papillomavirus type | 387. | Human papillomavirus type Xd |
| 327. | Human papillomavirus-71 | | 38b | 388. | Human papillomavirus type Xf |
| 328. | Human papillomavirus type | 356. | Human papillomavirus type 80 | 389. | Human papillomavirus type Xg |
| | 71 | 357. | Human papillomavirus type 9 | 390. | Human papillomavirus type Xh |
| 329. | Human papillomavirus- | 358. | Human papillomavirus- | 391. | BK polyomavirus |
| | cand90 | | cand92 | 392. | JC polyomavirus |
| 330. | Human papillomavirus-49 | 359. | Human papillomavirus type 92 | 393. | Cowpox virus |
| 331. | Human papillomavirus type | 360. | Human papillomavirus- | 394. | Monkeypox virus |
| | 49 | | cand96 | 395. | Vaccinia virus |
| 332. | Human papillomavirus type | 361. | Human papillomavirus type 96 | 396. | Variola major virus |
| | 75 | 362. | Human papillomavirus-4 | 397. | Variola minor virus |
| 333. | Human papillomavirus type | 363. | Human papillomavirus type 4 | 398. | Human orf virus |
| | 76 | 364. | Human papillomavirus type 65 | 399. | Pseudocowpox virus |
| 334. | Human papillomavirus-5 | 365. | Human papillomavirus type 95 | 400. | Mammalian orthoreovirus 1 |
| 335. | Human papillomavirus type | 366. | Human papillomavirus-48 | 401. | Mammalian orthoreovirus 2 |
| | 12 | 367. | Human papillomavirus type 48 | 402. | Mammalian orthoreovirus 3 |
| 336. | Human papillomavirus type | 368. | Human papillomavirus-50 | 403. | Mammalian orthoreovirus 4 |
| | 14 | 369. | Human papillomavirus type 50 | | Ndelle |
| 337. | Human papillomavirus type | 370. | Human papillomavirus-60 | 404. | SARS orthoreovirus GD-2003 |
| | 14D | 371. | Human papillomavirus type 60 | 405. | Human rotavirus A |
| 338. | Human papillomavirus type | 372. | Human papillomavirus-1 | 406. | Human rotavirus B |
| | 19 | 373. | Human papillomavirus type 1a | 407. | Human rotavirus C |
| 339. | Human papillomavirus type | 374. | Human papillomavirus-41 | 408. | Human rotavirus ADRV-N |
| | 20 | 375. | Human papillomavirus type 41 | 409. | Human parvovirus B19 |
| 340. | Human papillomavirus type | 376. | Human papillomavirus-63 | 410. | Adeno-associated virus |
| | 21 | 377. | Human papillomavirus type 63 | 411. | Adeno-associated virus - 1 |
| | | | | 412. | Adeno-associated virus 6 |
| 413. | Adeno-associated virus-2 | 454. | Four Corners hantavirus | 493. | Oriboca virus |
| 414. | Adeno-associated virus 2H | 455. | Hantaan virus | 494. | Oropouche virus |
| 415. | Adeno-associated virus-3 | 456. | Hu39694 virus | 495. | Sathuperi virus |
| 416. | Adeno-associated virus 3B | 457. | Isla Vista virus | 496. | Shamonda virus |
| 417. | Adeno-associated virus-4 | 458. | Khabarovsk virus | 497. | Shuni virus |
| 418. | Adeno-associated virus-5 | 459. | Laguna Negra virus | 498. | Simbu virus |
| 419. | Adeno-associated virus-7 | 460. | Limestone Canyon virus | 499. | Wyeomyia virus |
| 420. | Adeno-associated virus-8 | 461. | Muleshoe virus | 500. | Punta Toro virus |
| 421. | Adeno-associated virus 10 | 462. | New York virus | 501. | Rift Valley fever virus |
| 422. | Adeno-associated virus 11 | 463. | Prairie vole hantavirus | 502. | Sandfly fever Naples virus |
| 423. | Adeno-associated virus 12 | 464. | Prospect Hill virus | 503. | Uukuniemi virus |
| 424. | Adeno-associated virus 9 | 465. | Puumala virus | 504. | Phlebovirus sp. |
| 425. | Human erythrovirus V9 | 466. | Reithrodontomys mexicanus | 505. | Bornavirus |
| 426. | Human erythrovirus VX | | hantavirus | 506. | Cote d'Ivoire ebolavirus |
| 427. | Simian parvovirus | 467. | Rio Mamore virus | 507. | Ebola virus |
| 428. | Human parvovirus 4 | 468. | Sapporo rat virus | 508. | Reston ebolavirus |
| 429. | Allpahuayo virus | 469. | Seoul virus | 509. | Sudan ebolavirus |
| 430. | Amapari virus | 470. | Sin Nombre virus | 510. | Zaire ebolavirus |
| 431. | Bear Canyon virus | 471. | Taimyr hantavirus | 511. | Marburgvirus |
| 432. | Cupixi virus | 472. | Thailand virus | 512. | Avulavirus |
| 433. | Flexal virus | 473. | Thottapalayam virus | 513. | Henipavirus |
| 434. | Guanarito virus | 474. | Topografov virus | 514. | Morbillivirus |
| 435. | Junin virus | 475. | Tula virus | 515. | Respirovirus |
| 436. | Latino virus | 476. | Vladivostok virus | 516. | Rubulavirus |
| 437. | Machupo virus | 477. | Crimean-Congo hemorrhagic | 517. | Human parainfluenza virus 1 |
| 438. | Oliveros virus | | fever virus | 518. | Human parainfluenza virus 3 |
| 439. | Parana virus | 478. | Dera Ghazi Khan virus | 519. | Human parainfluenza virus 2 |
| 440. | Pichinde virus | 479. | Dugbe virus | 520. | Human parainfluenza virus 4 |
| 441. | Pirital virus | 480. | Hughes virus | 521. | Human parainfluenza virus 4a |
| 442. | Sabia virus | 481. | Qalyub virus | 522. | Human parainfluenza virus 4b |
| 443. | Tacaribe virus | 482. | Sakhalin virus | 523. | Mapuera virus |
| 444. | Tamiami virus | 483. | Thiafora virus | 524. | Mumps virus |
| 445. | Whitewater Arroyo virus | 484. | Akabane virus | 525. | Human metapneumovirus |
| 446. | Lassa virus | 485. | Bunyamwera virus | 526. | Rabies virus |
| 447. | Amur virus | 486. | California encephalitis virus | 527. | Hirame rhabdovirus |
| 448. | Andes virus | 487. | Caraparu virus | 528. | Infectious hematopoietic |
| 449. | Bayou virus | 488. | Kairi virus | | necrosis virus |
| 450. | Black Creek Canal virus | 489. | Madrid virus | 529. | Viral hemorrhagic septicemia |
| 451. | Cano Delgadito virus | 490. | Main Drain virus | | virus |
| 452. | Dobrava virus | 491. | Manzanilla virus | 530. | Sendai virus |
| 453. | El Moro Canyon hantavirus | 492. | Marituba virus | 531. | Human adenovirus A-Infection |
| 532. | Human adenovirus type 12- | 552. | Human adenovirus type 34a- | 573. | Human adenovirus 19p- |
| | Infection | | Infection | | Infection |
| 533. | Human adenovirus type 18- | 553. | Human adenovirus type 35- | 574. | Human adenovirus 37-Infection |
| | Infection | | Infection | 575. | Human adenovirus type 10- |
| 534. | Human adenovirus type 31- | 554. | Human adenovirus type | | Infection |
| | Infection | | 35 + 11-Infection | 576. | Human adenovirus type 13- |
| 535. | Simian adenovirus type 10- | 555. | Human adenovirus type 35p- | | Infection |
| | Infection | | Infection | 577. | Human adenovirus type 15- |
| 536. | Simian adenovirus type 11- | 556. | Human adenovirus type 50- | | Infection |
| | Infection | | Infection | 578. | Human adenovirus type 15/H9- |
| 537. | Simian adenovirus type 14- | 557. | Human adenovirus type 50 | | Infection |
| | Infection | | prototype strain Wan-Infection | 579. | Human adenovirus type 17- |
| 538. | Simian adenovirus type 2- | 558. | Human adenovirus type 7- | | Infection |
| | Infection | | Infection | 580. | Human adenovirus type 19- |
| 539. | Simian adenovirus type 4- | 559. | Human adenovirus type 7a- | | Infection |
| | Infection | | Infection | 581. | Human adenovirus type 19a- |
| 540. | Simian adenovirus type 6- | 560. | Human adenovirus type 7d- | | Infection |
| | Infection | | Infection | 582. | Human adenovirus type 19p- |
| 541. | Simian adenovirus type 9- | 561. | Human adenovirus type 7d2- | | Infection |
| | Infection | | Infection | 583. | Human adenovirus type 20- |
| 542. | Human adenovirus B- | 562. | Human adenovirus type 7l- | | Infection |
| | Infection | | Infection | 584. | Human adenovirus type 22- |
| 543. | Human adenovirus 3 + 7- | 563. | Human adenovirus type 7p- | | Infection |
| | Infection | | Infection | 585. | Human adenovirus type 23- |
| 544. | Human adenovirus type 11- | 564. | Simian adenovirus 21- | | Infection |
| | Infection | | Infection | 586. | Human adenovirus type 24- |
| 545. | Human adenovirus type 11a- | 565. | Human adenovirus C-Infection | | Infection |
| | Infection | 566. | Human adenovirus type 1- | 587. | Human adenovirus type 25- |
| 546. | Human adenovirus type 11p- | | Infection | | Infection |
| | Infection | 567. | Human adenovirus type 2- | 588. | Human adenovirus type 26- |
| 547. | Human adenovirus type 14- | | Infection | | Infection |
| | Infection | 568. | Human adenovirus type 5- | 589. | Human adenovirus type 27- |
| 548. | Human adenovirus type 16- | | Infection | | Infection |
| | Infection | 569. | Human adenovirus type 6- | 590. | Human adenovirus type 28- |
| 549. | Human adenovirus type 21- | | Infection | | Infection |
| | Infection | 570. | Simian adenovirus type 13- | 591. | Human adenovirus type 29- |
| 550. | Human adenovirus type 3- | | Infection | | Infection |
| | Infection | 571. | Human adenovirus D-Infection | 592. | Human adenovirus type 30- |
| 551. | Human adenovirus type 34- | 572. | Human adenovirus 19a- | | Infection |
| | Infection | | Infection | 593. | Human adenovirus type 32- |
| | | | | | Infection |
| 594. | Human adenovirus type 33- | 614. | Simian adenovirus 22- | 641. | Listeria ivanovii subsp. |
| | Infection | | Infection | | ivanovii |
| 595. | Human adenovirus type 36- | 615. | Simian adenovirus 23- | 642. | Listeria ivanovii subsp. |
| | Infection | | Infection | | londoniensis |
| 596. | Human adenovirus type 37- | 616. | Simian adenovirus 24- | 643. | Listeria monocytogenes |
| | Infection | | Infection | 644. | Listeria seeligeri |
| 597. | Human adenovirus type 38- | 617. | Simian adenovirus 25- | 645. | Listeria welshimeri |
| | Infection | | Infection | 646. | Bacillus anthracis |
| 598. | Human adenovirus type 39- | 618. | Human adenovirus F-Infection | 647. | Bacillus cereus |
| | Infection | 619. | Human adenovirus type 40- | 648. | Yersinia pestis |
| 599. | Human adenovirus type 42- | | Infection | 649. | Mycoplasma adleri |
| | Infection | 620. | Human adenovirus type 41- | 650. | Mycoplasma agalactiae |
| 600. | Human adenovirus type 43- | | Infection | 651. | Mycoplasma agassizii |
| | Infection | 621. | Simian adenovirus type 19- | 652. | Mycoplasma alkalescens |
| 601. | Human adenovirus type 44- | | Infection | 653. | Mycoplasma alligatoris |
| | Infection | 622. | Mycobacterium africanum | 654. | Mycoplasma alvi |
| 602. | Human adenovirus type 45- | 623. | Mycobacterium bovis | 655. | Mycoplasma amphoriforme |
| | Infection | 624. | Mycobacterium canettii | 656. | Mycoplasma anatis |
| 603. | Human adenovirus type 46- | 625. | Mycobacterium microti | 657. | Mycoplasma anseris |
| | Infection | 626. | Mycobacterium pinnipedii | 658. | Mycoplasma arginini |
| 604. | Human adenovirus type 47- | 627. | Mycobacterium tuberculosis | 659. | Mycoplasma arthritidis |
| | Infection | 628. | Mycobacterium leprae | 660. | Mycoplasma auris |
| 605. | Human adenovirus type 48- | 629. | Pneumocystis carinii f. sp. | 661. | Mycoplasma BHJA |
| | Infection | | macaca | 662. | Mycoplasma bovigenitalium |
| 606. | Human adenovirus type 49- | 630. | Pneumocystis carinii f. sp. | 663. | Mycoplasma bovirhinis |
| | Infection | | muris | 664. | Mycoplasma bovis |
| 607. | Human adenovirus type 51- | 631. | Pneumocystis carinii f. sp. | 665. | Mycoplasma bovoculi |
| | Infection | | mustelae | 666. | Mycoplasma buccale |
| 608. | Human adenovirus type 8- | 632. | Pneumocystis carinii f. sp. | 667. | Mycoplasma buteonis |
| | Infection | | oryctolagi | 668. | Mycoplasma californicum |
| 609. | Human adenovirus type 8E- | 633. | Pneumocystis carinii f. sp. ratti | 669. | Mycoplasma canadense |
| | Infection | 634. | Pneumocystis carinii f. sp. | 670. | Mycoplasma canis |
| 610. | Human adenovirus type 9- | | rattus-quarti | 671. | Mycoplasma capricolum |
| | Infection | 635. | Pneumocystis carinii f. sp. | 672. | Mycoplasma capricolum subsp. |
| 611. | Human adenovirus E- | | rattus-secundi | | capricolum |
| | Infection | 636. | Pneumocystis carinii f. sp. | 673. | Mycoplasma capricolum subsp. |
| 612. | Human adenovirus type 4- | | rattus-tertii | | capripneumoniae |
| | Infection | 637. | Pneumocystis carinii f. sp. Suis | 674. | Mycoplasma caviae |
| 613. | Human adenovirus type 4a- | 638. | Listeria grayi | 675. | Mycoplasma cavipharyngis |
| | Infection | 639. | Listeria innocua | 676. | Mycoplasma citelli |
| | | 640. | Listeria ivanovii | 677. | Mycoplasma cloacale |
| 678. | Mycoplasma coccoides | 712. | Mycoplasma haemofelis | 746. | Mycoplasma phocicerebrale |
| 679. | Mycoplasma collis | 713. | Mycoplasma haemomuris | 747. | Mycoplasma phocidae |
| 680. | Mycoplasma columbinasale | 714. | Mycoplasma hominis | 748. | Mycoplasma phocirhinis |
| 681. | Mycoplasma columbinum | 715. | Mycoplasma hyopharyngis | 749. | Mycoplasma pirum |
| 682. | Mycoplasma columborale | 716. | Mycoplasma hyopneumoniae | 750. | Mycoplasma pneumoniae |
| 683. | Mycoplasma conjunctivae | 717. | Mycoplasma hyorhinis | 751. | Mycoplasma pneumophila |
| 684. | Mycoplasma corogypsi | 718. | Mycoplasma hyosynoviae | 752. | Mycoplasma primatum |
| 685. | Mycoplasma cottewii | 719. | Mycoplasma iguanae | 753. | Mycoplasma pullorum |
| 686. | Mycoplasma cricetuli | 720. | Mycoplasma imitans | 754. | Mycoplasma pulmonis |
| 687. | Mycoplasma crocodyli | 721. | Mycoplasma indiense | 755. | Mycoplasma putrefaciens |
| 688. | Mycoplasma cynos | 722. | Mycoplasma iners | 756. | Mycoplasma salivarium |
| 689. | Mycoplasma dispar | 723. | Mycoplasma iowae | 757. | Mycoplasma simbae |
| 690. | Mycoplasma edwardii | 724. | Mycoplasma lagogenitalium | 758. | Mycoplasma spermatophilum |
| 691. | Mycoplasma elephantis | 725. | Mycoplasma leonicaptivi | 759. | Mycoplasma sphenisci |
| 692. | Mycoplasma equigenitalium | 726. | Mycoplasma leopharyngis | 760. | Mycoplasma spumans |
| 693. | Mycoplasma equirhinis | 727. | Mycoplasma lipofaciens | 761. | Mycoplasma sturni |
| 694. | Mycoplasma falconis | 728. | Mycoplasma lipophilum | 762. | Mycoplasma sualvi |
| 695. | Mycoplasma fastidiosum | 729. | Mycoplasma maculosum | 763. | Mycoplasma subdolum |
| 696. | Mycoplasma faucium | 730. | Mycoplasma meleagridis | 764. | Mycoplasma suis |
| 697. | Mycoplasma felifaucium | 731. | Mycoplasma microti | 765. | Mycoplasma synoviae |
| 698. | Mycoplasma feliminutum | 732. | Mycoplasma moatsii | 766. | Mycoplasma testudineum |
| 699. | Mycoplasma felis | 733. | Mycoplasma mobile | 767. | Mycoplasma testudinis |
| 700. | Mycoplasma fermentans | 734. | Mycoplasma molare | 768. | Mycoplasma timone |
| 701. | Mycoplasma incognitus | 735. | Mycoplasma monodon | 769. | Mycoplasma verecundum |
| 702. | Mycoplasma flocculare | 736. | Mycoplasma muris | 770. | Mycoplasma vulturii |
| 703. | Mycoplasma gallinaceum | 737. | Mycoplasma mustelae | 771. | Mycoplasma wenyonii |
| 704. | Mycoplasma gallinarum | 738. | Mycoplasma mycoides | 772. | Mycoplasma yeatsii |
| 705. | Mycoplasma gallisepticum | 739. | Mycoplasma neurolyticum | 773. | Mycoplasma zalophi |
| 706. | Mycoplasma gallopavonis | 740. | Mycoplasma opalescens | 774. | Toxoplasma gondii |
| 707. | Mycoplasma gateae | 741. | Mycoplasma orale | 775. | Chlamydia suis |
| 708. | Mycoplasma genitalium | 742. | Mycoplasma ovipneumoniae | 776. | Chlamydia trachomatis |
| 709. | Mycoplasma glycophilum | 743. | Mycoplasma ovis | 777. | Fungal infections |
| 710. | Mycoplasma gypis | 744. | Mycoplasma oxoniensis | | |
| 711. | Mycoplasma haemocanis | 745. | Mycoplasma penetrans | | |

[0133] A further group of diseases for the treatment and/or prevention of which the CD3 kappa peptides and the nucleic acids coding therefor, respectively, and in particular the CD3 kappa peptide related compounds are used in a preferred embodiment, are those where the surface expression of the TCR is abundant, more particularly higher than expected under normal or non-diseased conditions, or where the surface expression of the TCR is found in lymphocytes in compartments where in the healthy subjects a lower TCR expression can be found. CD3 kappa peptides and the nucleic acids coding therefor, respectively, and in particular the CD3 kappa peptide related compounds are used in the treatment of higher expression of named antiapoptotic and/or proliferation inducing receptors, and/or the named cytokines

[0134] In other words, the CD3 kappa peptides and the nucleic acids coding therefor, respectively, and in particular the CD3 kappa peptide related compounds are used in an embodiment for the treatment and/or prevention of a disease where the increased or prolonged surface expression of the T cell receptor, and/or the antiapoptotic, and/or proliferation inducing receptors recited herein, and/or the cytokines recited herein, gives rise to, is linked to or is associates with a pathological condition which is the respective disease, a pre-stage thereof or which increases the susceptibility of a subject for such disease. Such diseases are preferably autoimmune diseases and more preferably selected from the group comprising the diseases summarized in table 2.

TABLE 2
Autoimmune disorders which can be treated in accordance with
the present Invention

| | |
|---|---|
| 1. | Takayasu Arteritis |
| 2. | Giant-cell arteritis |
| 3. | familial mediterranean |
| | fever |
| 4. | Kawasaki disease |
| 5. | Polyarteritis nodosa |
| 6. | cutanous Polyarteritis |
| | nodosa |
| 7. | Hepatitis-associated |
| | arteritis |
| 8. | Behcet's syndrome |
| 9. | Wegener's |
| | granulomatosis |
| 10. | Churg-Strauss |
| | syndrome |
| 11. | microscopic |
| | polyangiitis |
| 12. | Vasculitis of |
| | connective tissue |
| | diseases |
| 13. | Hennoch-Schonlein |
| | purpura |
| 14. | Cryoglobulinemic |
| | vasculitis |
| 15. | Cutaneous |
| | leukocytoclastic |
| | angiitis |
| 16. | Tropical aortitis |
| 17. | Sarcoidosis |
| 18. | Cogan's syndrome |
| 19. | Wiskott-Aldrich |
| | Syndrome |
| 20. | Lepromatous arteritis |
| 21. | Primary angiitis of the |
| | CNS |
| 22. | Thromboangiitis |
| | obliterans |
| 23. | Paraneoplastic ateritis |
| 24. | Urticaria |
| 25. | Dego's disease |
| 26. | Myelodysplastic |
| | syndrome |
| 27. | Eythema elevatum |
| | diutinum |
| 28. | Hyperimmunoglobulin D |
| 29. | Allergic Rhinitis |
| 30. | Asthma bronchiale |
| 31. | chronic obstructive |
| | pulmonary disease |
| 32. | periodontitis |
| 33. | Rheumatoid Arthritis |
| 34. | atherosclerosis |
| 35. | Amyloidosis |
| 36. | Morbus Chron |
| 37. | Colitis ulcerosa |
| 38. | Autoimmune Myositis |
| 39. | Diabetes mellitus |
| 40. | Multiple sclerosis |
| 41. | Guillain-Barre |
| | Syndrome |
| 42. | histiocytosis |
| 43. | Osteoarthritis |
| 44. | atopic dermatitis |
| 45. | periodontitis |
| 46. | chronic rhinosinusitis |
| 47. | Psoriasis |
| 48. | psoriatic arthritis |
| 49. | Microscopic colitis |
| 50. | Pulmonary fibrosis |
| 51. | glomerulonephritis |
| 52. | Whipple's disease |
| 53. | Still's disease |
| 54. | erythema nodosum |
| 55. | otitis |
| 56. | cryoglobulinemia |
| 57. | Sjogren's syndrome |
| 58. | Lupus erythematosus |
| 59. | aplastic anemia |
| 60. | Osteomyelofibrosis |
| 61. | chronic inflammatory |
| | demyelinating |
| | polyneuropathy |
| 62. | Kimura's disease |
| 63. | systemic sclerosis |
| 64. | chronic periaortitis |
| 65. | chronic prostatitis |
| 66. | idiopathic pulmonary |
| | fibrosis |
| 67. | chronic |
| | granulomatous disease |
| 68. | Idiopathic achalasia |
| 69. | bleomycin-induced |
| | lung inflammation |
| 70. | cytarabine-induced |
| | lung inflammation |
| 71. | Autoimmunthrombozytopenia |
| 72. | Autoimmunneutropenia |
| 73. | Autoimmunhemolytic |
| | anemia |
| 74. | Autoimmunlymphocytopenia |
| 75. | Chagas' disease |
| 76. | chronic autoimmune |
| | thyroiditis |
| 77. | autoimmune hepatitis |
| 78. | Hashimoto's |
| | thyroiditis |
| 79. | atropic thyroiditis |
| 80. | Graves disase |
| 81. | Autoimmune |
| | polyglandular |
| | syndrome |
| 82. | Autoimmune Addison |
| | Syndrome |
| 83. | Pemphigus vulgaris |
| 84. | Pemphigus foliaceus |
| 85. | Dermatitis |
| | herpetiformis |
| 86. | Autoimmune alopecia |
| 87. | Vitiligo |
| 88. | Antiphospholipid |
| | syndrome |
| 89. | Myasthenia gravis |
| 90. | Stiff-man syndrome |
| 91. | Goodpasture's |
| | syndrome |
| 92. | Sympathetic |
| | ophthalmia |
| 93. | Folliculitis |
| 94. | Sharp syndrome |
| 95. | Evans syndrome |

[0135] It will be acknowledged by the one skilled in the art that particularly those diseases where the T cell receptor surface expression is to be reduced for achieving a therapeutically beneficial effect, CD3 kappa peptide related compounds can be advantageously used, whereby such CD3 kappa peptide related compounds are targeting or interacting wildtype CD3 kappa peptide, preferably the CD3 kappa peptide according to SEQ.ID.No.4, and any nucleic acids coding therefor. Such compounds are preferably selected from the group comprising small molecules, antibodies, high affinity binding peptides, anticalines, aptamers, spiegelmers, antisense-nucleic acids, ribozymes and RNAi molecules which are described herein in more detail.

[0136] The use of the CD3 kappa peptide and the nucleic acids coding therefor, for this kind of disease is, in principle, also possible under the proviso that the administration of an analogue of CD3 kappa or a nucleic acid coding therefor results in the blocking of the physiologically present CD3 kappa peptide. Preferably such analogue has an amino acid sequence according to SEQ ID NO. 5-4437. A possible explanation for this effect is competitive inhibition. In connection therewith particularly those derivatives of CD3 kappa peptides are advantageous and can be advantageously used which do not have one, preferably more and most preferably all of the characteristics of the CD3 kappa peptide having the amino acid sequence according to SEQ. ID. NO. 4.

[0137] Additionally, the diseases which can be addressed, i.e. treated or prevented, by either using the CD3 kappa peptides and nucleic acids coding therefor such as by, e. g., the afore-mentioned mechanism of competitive inhibition, or by the CD3 kappa peptide related compounds, may also be defined by the further effects of CD3 kappa, in particular the effect of the CD3 kappa peptide having amino acid sequence according to SEQ. ID. NO. 4. This is based on the further surprising finding of the present inventors that an increased titre of CD3 kappa having the amino acid sequence according to SEQ. ID. NO. 4 goes along with or is associated with an increased expression of CD4, CD2, CD25, CD116, CD127, CCR5, CCR9, CXCR1, CXCR3, EGF, Eotaxin-2, 1-309, IFNgamma, IL-1 alpha, IL-1 beta, IL-3, IL-6, NAP-2, TGF-beta3, and PARC. Preferably, the increase in the expression of CD4, CD2, CD25, CD116, CD127, CCR5, CCR9, CXCR1, CXCR3 after CD3 kappa peptide treatment, preferably within 48 hours, by at least a factor of 50%, more preferably by at least 100% and even more preferably by at least 200%. The increase in the expression of the proinflammatory cytokines and chemokines EGF, Eotaxin-2, 1-309, IL-β, IL-3, IL-6, NAP-2, TGFβ3 and PARC after CD3 kappa peptide treatment, preferably within 48 hours, is by at least a factor of 50%, more preferably at least 100% and even more preferably at least 200% . The increase in the expression of IL-1α and IFNγ after CD3 kappa peptide treatment, preferably within 48 hours, is by at least a factor of 100%, more preferably at least 200% and even more preferably at least 500%.

[0138] More specifically, any disease which goes along with the decreased expression of these proteins can thus be prevented and/or treated using the CD3 kappa peptide and the respective nucleic acid coding therefor. The particular diseases to be thus treated or prevented can be more specifically taken from the mode of action of any of these cytokines and chemokines Accordingly, as outlined above, all infections caused by or associated with viruses or intracellular pathogens as those listed in table 1 can be treated with CD3 kappa peptides or nucleic acids coding therefor. The following table 3 summarized some of the diseases which can accordingly be treated and prevented, respectively.

TABLE 3
Further diseases which can be treated using CD3 kappa peptides
and nucleic acids coding therefor (in addition to table 1).

| | |
|---|---|
| 1. | Chronic granulomatous disease |
| 2. | Chediak-Higashi syndrome |
| 3. | Leukocyte adhesion defect |
| 4. | Complement deficiencies |
| 5. | NK cell defect |
| 6. | X-linked hyper-IgM syndrome |
| 7. | Common variable immunodeficiency |
| 8. | Selective IgA deficiency |
| 9. | X-linked agammaglobulinemia (XLA) |
| 10. | Wiskott-Aldrich Syndrome |
| 11. | Bare lymphocyte syndrome (Class I) |
| 12. | Bare lymphocyte syndrome (Class II) |
| 13. | DiGeorge's syndrome |
| 14. | Severe Combined Immune Deficiency |
| | (SCID) |
| 15. | X-linked lymphoproliferative syndrome |
| 16. | Ataxia telangiectasia |
| 17. | Bloom's syndrome |
| 18. | Zap-70 deficiency |
| 19. | Purine nucleoside phosphorylase |
| | (PNP) deficiency |
| 20. | Nezelof syndrome |
| 21. | CD3ε and CD3γ deficiencies |
| 22. | Omenn syndrome |
| 23. | Reticular dysgenesis |
| 24. | Adenosine deaminase (ADA) |
| | deficiency |
| 25. | JAK3 deficiency |
| 26. | TAP2 deficiency |
| 27. | CIITA, RFX, and RFXAP |
| | deficiencies |
| 28. | Fanconi anaemia |
| 29. | Xeroderma pigmentosum |
| 30. | Nijmegen breakage syndrome |

[0139] It will also be acknowledged by the ones skilled in the art that some of the diseases mediated through or associated with these cytokines, chemokines or the said receptors, may be identical to or overlapping to the specific diseases disclosed herein. However, in any case such diseases will be obvious to the one skilled in the art in the light of the present disclosure.

[0140] In a similar way as the inventors defined above the characteristics of what is preferably understood herein by the term “decreased expression of the TCR” and the capability of the CD3 kappa peptides and nucleic acids coding therefor to normalize and/or increase the expression thereof, particularly in connection with the various diseases related thereto and as disclosed herein, this can also be done to show the beneficial effect in regards to the expression of the proinflammatory cytokines and chemokines, and of the said receptors going along with such decreased expression of the TCR as disclosed herein.

[0141] Insofar, the difference in expression between patients and healthy subjects should preferably be the mean value of the expression of the said proinflammatory cytokines and chemokines, and of the said receptors of the healthy subjects plus three times the standard deviation, or should also possibly be congruent to statistical hypothesis testing with a p-value of or below 0.05, making the difference statistically significant.

[0142] Also using this criterion, the present inventors have found that the expression of the said proinflammatory cytokines and chemokines, and of the respective said receptors in the leukocytes in the patient populations described herein can be increased by CD3 kappa peptides, its derivatives and nucleic acids coding therefor to normal values as defined by healthy individuals.

[0143] Additionally, the diseases which can be addressed, i.e. treated or prevented, by either using the CD3 kappa peptides and nucleic acids coding therefor, may also be defined by the further effects of CD3 kappa disclosed herein, in particular the effect of the CD3 kappa peptide having amino acid sequence according to SEQ. ID. NO. 4 residing in the decrease of the expression of a compound selected from the group comprising CD58, IL-1ra, IL-8, RANTES, SDF-1, TARC, MCP-4, GRO, soluble IL-6 receptor and soluble TNF-receptor II. This is based on the further surprising finding of the present inventors that an increased titre of CD3 kappa having the amino acid sequence according to SEQ. ID. NO. 4 goes along with or is associated with a decreased expression of CD58, IL-1ra, IL-8, RANTES, SDF-1, TARC, MCP-4, GRO, soluble IL-6 receptor and soluble TNF-receptor II. More specifically, any disease which goes along with an increased expression of CD58, IL-1ra, IL-8, RANTES, SDF-1, TARC, MCP-4, GRO, soluble IL-6 receptor and soluble TNF-receptor II, respectively can thus be prevented and/or treated using the CD3 kappa peptides and the respective nucleic acid coding therefor. The decrease in the expression of those factors after CD3 kappa peptide treatment, preferably within 48 hours, is by at least a factor of 50%, more preferably at least 100% and even more preferably at least 200%. The particular diseases to be thus treated or prevented can be more specifically taken from the mode of action of any of these cytokines and chemokines and is, for example disclosed in. Table 2 summarized some of the diseases which can accordingly be treated and prevented, respectively.

[0144] It will also be acknowledged by the ones skilled in the art that some of the diseases mediated through or associated with these cytokines and chemokines, respectively, may be identical to or overlapping to the specific diseases disclosed herein, however, in any case such diseases will be obvious to the one skilled in the art in the light of the present disclosure.

[0145] In the same way as the inventors defined above the characteristics of what is preferably understood herein by the term “decreased expression of the TCR” and the capability of the CD3 kappa peptides and nucleic acids coding therefor to normalize and/or increase the expression thereof, particularly in connection with the various diseases related thereto and as disclosed herein, this can also be done to show the beneficial effect in regards to the expression of the said cytokines and chemokines, and of CD58.

[0146] Insofar, the difference in expression between patients and healthy subjects should preferably be the mean value of the expression of the said cytokines and chemokines, and of CD58 of the healthy subjects plus three times the standard deviation, or should also possibly be congruent to statistical hypothesis testing with a p-value of or below 0.05, making the difference statistically significant.

[0147] Also having used this criterion, the present inventors have found that the expression of the said cytokines and chemokines, and of CD58 in the leukocytes in the patient populations described herein can be decreased by CD3 kappa peptides, its derivatives and nucleic acids coding therefor.

[0148] As disclosed herein the CD3 kappa peptides and the nucleic acids coding therefor, will be suitable to increase the TCR surface expression status of a patient and of a healthy subject. Insofar, any medicament comprising at least one of the CD3 kappa peptides and/or at least one of the nucleic acids coding therefor, can be used for restoring the immune status of a patient or subject, preferably healthy subject, also referred to herein together as person. Such person may be a person who has been, is or will be undergoing a treatment which results or may result in depletion of T cells and more specifically surface expression of the T cell receptor. This kind of person may thus be a person which has, is or will be undergoing chemotherapy, therapy with biologicals as antibodies, cytokines or other recombinant proteins, and radiation therapy, respectively. Another group of persons to which the CD3 kappa peptides and the nucleic acids coding therefor or any medicament or pharmaceutical composition comprising the same may or will be administered, is thus any person suffering from or being at the risk of suffering from a reduction or depletion of T cell receptor expression, whereby such reduced T cell receptor expression preferably results from a disease or a genetic disorder. Such genetic disorders are for example included in Table 3.

[0149] Again without [[whishing]] wishting to be bound by any theory, the present inventors assume that CD3 kappa having the amino acid sequence according to SEQ:ID.No.4 is suitable to direct T cells to secrete cytokines congruent to a TH₀ or TH₁ profile rather than to a TH₂ profile. Insofar, the use of the CD3 kappa peptides and the nucleic acids coding therefor, is also suitable in the prevention and/or treatment of any disease which is characterized by or can be prevented and/or treated by increasing the TH₁ response of a person, preferably a patient. Insofar, the CD3 kappa peptides and the nucleic acids coding therefor, can be used in vaccination. It is thus also within the present invention that the CD3 kappa peptides and the nucleic acids coding therefor, are used either alone or in combination as adjuvants.

[0150] It is within the present invention that any of the medicament and pharmaceutical composition, respectively, described herein comprising at least one of the pharmaceutically active compound according to the present invention herein may be used for the treatment and/or prevention of a diseases, preferably any of the diseases disclosed herein.

[0151] As preferably used herein, the term pharmaceutically active compound according to the present invention comprises one of the compounds selected from the group comprising CD3 kappa peptides, nucleic acids coding therefor and CD3 kappa peptide related compounds, whereby such CD3 kappa peptide related compounds also comprise small molecules. Preferably, as used herein, small molecules are molecules which are pharmaceutically active and fulfil the Lepinsky rules of five and, additionally and/or alternatively have a molecular weight of 1000 or less.

[0152] Apart from being used as ingredient of a pharmaceutical composition or for the manufacture of a medicament, particularly the CD3 kappa peptide related compounds are used in a preferred embodiment as diagnostics or means for diagnostic. This use of the CD3 kappa related compounds is based on the finding that CD3 kappa is overexpressed in connection with those diseases specified above. Insofar, these CD3 kappa related compounds are preferably useful in the diagnostic of diseases going along with an increased CD3 kappa peptide titre, preferably an increased titre of CD3 kappa having an amino acid sequence according to SEQ.ID.No. 4, or an increased transcription and/or translation of a nucleic acid sequence coding for CD3 kappa having the amino acid sequence according to SEQ.ID:No.4.

[0153] When used as diagnostics the CD3 kappa peptide related compounds are either labelled so as to allow the detection thereof, or are further reacted with another compound detecting the CD3 kappa peptide related compound, preferably the CD3 kappa peptide related compound is complexed with either CD3 kappa, preferably CD3 kappa having the amino acid sequence according to SEQ.ID.No. 4, or a nucleic acid coding therefor. Preferably said another compound comprises a label or is adapted to allow the detection thereof.

[0154] It is within the present invention that in a preferred embodiment the terms disease and disorder are used in an interchangeable manner, if not indicated to the contrary.

[0155] It is also within the present invention that the pharmaceutically active compounds according to the present invention may be used for the treatment of a person or a patient suffering from a disease or diseased condition as defined above. Such treatment comprises the administration of one or several of the compounds according to the present invention or a medicament or pharmaceutical composition described herein. Preferably, the person is a mammal and most preferably a human being. In a further embodiment the person is in need of such treatment.

[0156] Depending on the specific conditions, disease or disorder to be treated, such pharmaceutically active compounds may be formulated and administrated systemically or locally. Techniques for formulation and administration may be found in “Remington's Pharmaceutical Sciences”, 1990, 18^{th} ed., Mack Publishing Co., Easton, Pa. The administration of such pharmaceutically active compound according to the present invention can be done in a variety of ways, including, but not limited to, orally, subcutaneously, intravenously, intranasally, transdermally, intraperitoneally, intramuscularly, intrapulmonary, vaginally, rectally, or intraocularly, perioculary, intraorbitally, intracapsulary, intrasynovially, intracisternally, topically, just to name a few. In some instances, for example, in the treatment of wounds and inflammation, the compound according to the present invention may be directly applied as a ointment, powder, solution or spray. Topical administration also comprises passive or facilitated adsorption, preferably through the skin, including skin patches and ionophoresis.

[0157] In an embodiment of the various aspects of the present invention, a pharmaceutically active compound according to the present invention is administered together with a further pharmaceutically active compound.

[0158] Apart from being a potential drug itself, the CD3 kappa peptides and the nucleic acids coding therefor may be used as the compound against which chemical compounds which may be used as drugs or drug candidates or as diagnostic agents, are directed. These chemical compounds belong to different classes of compounds such as antibodies, peptides, anticalines, aptamers, spiegelmers, ribozymes, antisense oligonucleotides and siRNA as well as small molecules which are also referred to herein in their entity as CD3 kappa peptide related compounds. The compounds are designed, selected, screened generated and/or manufactured by either using the CD3 kappa peptides and the nucleic acids coding therefor themselves as a physical or chemical entity, or information related to the CD3 kappa peptides and the nucleic acids coding therefor. Albeit it is referred to herein in the following mostly to the CD3 kappa peptides and the nucleic acids coding therefor in their entirety, it will be understood by the ones skilled in the art that preferably the CD3 kappa peptide having or comprising the amino acid sequence according to SEQ.ID:No.4 and the nucleic acid(s) coding therefor will be the target(s) and, respectively, that the various classes of compounds will be addressing and interacting, respectively, with the CD3 kappa peptide having or comprising the amino acid sequence according to SEQ.ID:No.4 and the nucleic acid(s) coding therefor. In the design, selection, screening, generation and/or manufacturing process of said classes of compounds the CD3 kappa peptides and the nucleic acids coding therefor will also be referred to as the target which is used in the process rather than in the final application of the respective compound to a patient in need thereof. In the processes which provide the various classes of compounds, either the CD3 kappa peptides or the nucleic acids coding therefor may be used. The term CD3 peptides as used herein comprises any fragment or derivative of the CD3 kappa peptide as disclosed herein which allows the design, selection, screening, generation and/or manufacture of said classes of compounds of the respective class(es) of compounds which in turn are/is upon their/its application as a medicament or as a diagnostic agent active as such. The term nucleic acid coding for the CD3 kappa peptides as used herein in connection with the CD3 kappa peptide related compounds shall comprise any nucleic acid which contains a nucleic acid which codes for the CD3 kappa peptides as defined above and herein, or a part thereof. A part of a nucleic acid coding for the CD3 kappa peptides is regarded as such as long as it is still suitable for the design, selection, screening, generation and/or manufacture of said classes of compounds which in turn are/is upon their/its application as a medicament or as a diagnostic agent active as such. The nucleic acid coding for the CD3 kappa peptides can be genomic nucleic acid, hnRNA, mRNA, cDNA or part of each thereof.

[0159] As outlined above it is within the present invention that apart from the CD3 kappa peptides or a part or derivative thereof or a nucleic acid sequence coding therefor, as described herein, also other means or compounds may be used in order to create or to suppress the effects arising from the CD3 kappa peptide having the amino acid sequence according to SEQ.ID.No 4 or the nucleic acid coding therefor. Such means may be determined or selected in a screening method. In such screening method a first step is to provide one or several so called candidate compounds. Candidate compounds as used herein are compounds the suitability of which is to be tested in a test system for treating or alleviating the various diseases as described herein and diseased conditions as described herein or to be used as a diagnostic means or agent for this kind of diseases and diseased conditions. If a candidate compound shows a respective effect in a test system said candidate compound is a suitable means or agent for the treatment of said diseases and diseased conditions and, in principle, as well a suitable diagnostic agent for said diseases and diseased conditions. In a second step the candidate compound is contacted with a CD3 kappa peptides expression system or a CD3 kappa peptides gene product, preferably a respective gene expression product, such as a hnRNA or mRNA coding for CD3 kappa having an amino acid sequence according the SEQ.ID:No.4, or a CD3 kappa peptides activity system or one of the CD3 kappa peptides, preferably the CD3 kappa having an amino acid sequence according to SEQ:ID:No.4. The CD3 kappa peptides activity system is also referred to herein as and/or is preferably also active in the meaning of a system detecting the activity of a CD3 kappa peptides, more preferably of CD3 kappa having an amino acid sequence according to SEQ.ID.NO.4.

[0160] An expression system for CD3 kappa peptides is basically an expression system which shows or displays the expression of one of the CD3 kappa peptides, preferably of CD3 kappa having an amino acid sequence according to SEQ.ID.NO.4, whereby the extent or level of expression basically may be changed. Preferably, a CD3 kappa peptides activity system is essentially an expression system, whereby the activity or condition of activity is measured rather than the expression of a CD3 kappa peptide. Alternatively, a CD3 kappa peptide activity system is a CD3 kappa peptide system whereby the activity of such CD3 kappa peptide can be measured, or a system providing or comprising a CD3 kappa peptide. In any of these systems it is tested whether under the influence of a candidate compound the activity of a CD3 kappa peptide and more preferably of CD3 kappa having the amino acid sequence according to SEQ.ID. NO.4 or of the nucleic acid coding therefor, is different from the situation without the candidate compound. Regardless whether the particular system is either an expression system or an activity system, it is within the scope of the present invention that either an increase or a decrease of the activity and expression, respectively, may occur and be measured. Preferably, the expression system and/or activity system is an in vitro reaction using sub-cellular means, such as a cell extract or a fraction of the cell extract such as a nucleus extract. A CD3 kappa peptide expression system as used herein may also be a cell, preferably a cell of a tissue or organ involved in the diseases as described herein and diseased conditions as described herein.

[0161] Whether there is an increase or decrease in the activity system or expression system, may be determined at each level of the expression, for example by measuring the increase or decrease of the amount of nucleic acid coding for a CD3 kappa peptides, preferably CD3 kappa having an amino acid sequence according to SEQ.ID:NO.4, more particularly mRNA or the increase or decrease of a CD3 kappa peptide, preferably CD3 kappa having an amino acid sequence according to SEQ.ID:NO.4 expressed under the influence of the candidate compound. The techniques required for the measurement, more particularly the quantitative measurement of this kind of changes, such as for the mRNA or the protein are known to the one skilled in the art. Also known to the one skilled in the art are methods to determine the amount of or content of CD3 kappa peptides, preferably CD3 kappa having an amino acid sequence according to SEQ.ID:NO.4, e. g. by the use of appropriate antibodies. Antibodies may be generated as known to the one skilled in the art and described, e. g. by Harlow, E., and Lane, D., “Antibodies: A Laboratory Manual,” Cold Spring Harbor Laboratory, Cold Spring Harbor, N.Y.,(1988).

[0162] In case of a CD3 kappa peptide expression system, whereby preferably the CD3 kappa peptide is CD3 kappa having an amino acid sequence according to SEQ.ID:NO.4, an increase or decrease of the activity of a CD3 kappa peptide, preferably CD3 kappa having an amino acid sequence according to SEQ.ID:NO.4 may be determined, preferably in a functional assay.

[0163] Contacting the candidate compound and the expression system and activity system, respectively, is usually performed by adding an aqueous solution of the candidate compound to a respective reaction system which is generally referred to herein as test system. Besides aqueous solutions also suspensions or solutions of the candidate compound in organic solvents may be used. The aqueous solution is preferably a buffer solution.

[0164] Preferably, in each run using the expression system and activity system, respectively, only a single candidate compound is used. However, it is also within the present invention that several of these tests are performed in parallel in a high throughput system.

[0165] A further step in the method according to the present invention resides in determining whether under the influence of the candidate compound the expression or activity of the expression system and activity system, respectively, in relation to a CD3 kappa peptide, preferably CD3 kappa having an amino acid sequence according to SEQ.ID:NO.4 or a nucleic acid coding therefor, is changed. Typically this is done by comparing the system's reaction upon addition of the candidate compound relative to the one without addition of the candidate compound. Preferably, the candidate compound is a member of a library of compounds.

[0166] Basically any library of compounds is suitable for the purpose of this invention regardless of the class of compounds. Suitable libraries of compounds are, among others, libraries composed of small molecules, of peptides, proteins, antibodies, anticalines and functional nucleic acids. The latter compounds may be generated as known to the one skilled in the art and outlined herein.

[0167] The manufacture of an antibody specific for the a CD3 kappa peptides having an amino acid or for the nucleic acids coding therefore, is known to the one skilled in the art and, for example, described in Harlow, E., and Lane, D., “Antibodies: A Laboratory Manual,” Cold Spring Harbor Laboratory, Cold Spring Harbor, N.Y.,(1988). Preferably, monoclonal antibodies may be used in connection with the present invention which may be manufactured according to the protocol of Köhler and Milstein and further developments based thereon. Antibodies as used herein include, but are not limited to, complete antibodies, antibody fragments or derivatives such as Fab fragments, Fc fragments and single-stranded antibodies, as long as they are suitable and capable of binding to the CD3 kappa peptides. Apart from monoclonal antibodies also polyclonal antibodies may be used and/or generated. The generation of polyclonal antibodies is also known to the one skilled in the art and, for example, described in Harlow, E., and Lane, D., “Antibodies: A Laboratory Manual,” Cold Spring Harbor Laboratory, Cold Spring Harbor, N.Y., (1988). Preferably, the antibodies used for therapeutical purposes are humanized or human antibodies as defined above.

[0168] The antibodies which may be used according to the present invention may have one or several markers or labels. Such markers or labels may be useful for detecting the antibody either in its diagnostic application or its therapeutic application. Preferably the markers and labels are selected from the group comprising avidine, streptavidine, biotin, gold and fluorescein and used, e. g., in ELISA methods. These and further markers as well as methods are, e. g., described in Harlow, E., and Lane, D., “Antibodies: A Laboratory Manual,” Cold Spring Harbor Laboratory, Cold Spring Harbor, N.Y.,(1988).

[0169] It is also within the present invention that the label or marker exhibits an additional function apart from detection, such as interaction with other molecules. Such interaction may be, e.g., specific interaction with other compounds. These other compounds may either be those inherent to the system where the antibody is used such as the human or animal body or the sample which is analyzed by using the respective antibody. Appropriate markers may, for example, be biotin or fluoresceine with the specific interaction partners thereof such as avidine and streptavidine and the like being present on the respective compound or structure to interact with the thus marked or labelled antibody.

[0170] Further classes of medicaments as well as diagnostic agents which may be generated using the CD3 kappa peptides or the nucleic acid coding therefor, are peptides which bind thereto. Such peptides may be generated by using methods according to the state of the art such as phage display. Basically, a library of peptide is generated, such as in form of phages, and this kind of libraries is contacted with the target molecule, in the present case, for example, the CD3 kappa peptides. Those peptides binding to the target molecule, i.e. one of the CD3 kappa peptides, are subsequently removed, preferably as a complex with the target molecule, from the respective reaction. It is known to the one skilled in the art that the binding characteristics, at least to a certain extend, depend on the particularly realized experimental set-up such as the salt concentration and the like. After separating those peptides binding to the target molecule with a higher affinity or a bigger force, from the non-binding members of the library, and optionally also after removal of the target molecule from the complex of target molecule and peptide, the respective peptide(s) may subsequently be characterised. Prior to the characterisation optionally an amplification step is realized such as, e. g. by propagating the peptide coding phages. The characterisation preferably comprises the sequencing of the target binding peptides. Basically, the peptides are not limited in their lengths, however, preferably peptides having a lengths from about 8 to 20 amino acids are preferably obtained in the respective methods. The size of the libraries may be about 10² to 10¹⁸, preferably 10⁸ to 10¹⁵ different peptides, however, is not limited thereto. The thus identified peptides are also preferably referred to as peptide aptamers.

[0171] A particular form of target binding polypeptides are the so-called “anticalines” which are, among others, described in German patent application DE 197 42 706.

[0172] According to the present invention the protein of the CD3 kappa peptides and the nucleic acid(s) coding therefor may be used as the target for the manufacture or development of a medicament for the treatment of the diseases described herein and of the diseased conditions described herein, as well as for the manufacture and/or development of means for the diagnosis of said diseases and said conditions, in a screening process, whereby in the screening process small molecules or libraries of small molecules are used. This screening comprises the step of contacting the target molecule with a single small molecule or a variety of small molecules at the same time or subsequently, preferably those from the library as specified above, and identifying those small molecules or members of the library which bind to the target molecules which, if screened in connection with other small molecules may be separated from the non-binding or non-interacting small molecules. It will be acknowledged that the binding and non-binding may strongly be influenced by the particular experimental set-up. In modifying the stringency of the reaction parameters it is possible to vary the degree of binding and non-binding which allows a fine tuning of this screening process. Preferably, after the identification of one or several small molecules which specifically interact with the target molecule, this small molecule may be further characterised. This further characterisation may, for example, reside in the identification of the small molecule and determination of its molecule structure and further physical, chemical, biological and/or medical characteristics. Preferably, the natural compounds have a molecular weight of about 100 to 1000 Da. Also preferably, small molecules are those which comply with the Lepinsky rules of five known to the ones skilled in the art. Alternatively, small molecules may also be defined such that they are synthetic-small-molecules, preferably arising from combinatorial chemistry, in contrast to natural products which preferably are non-synthetic. However, it is to be noted that these definitions are only subsidiary to the general understanding of the respective terms in the art.

[0173] It is also within the present invention to use the CD3 kappa peptides and the nucleic acid(s) coding therefor as a target molecule for the manufacture or selection of aptamers and spiegelmers which may then be used directly or indirectly either as medicament or as diagnostic agents.

[0174] Aptamers are D-nucleic acids which are either single stranded or double stranded which specifically interact with a target molecule. The manufacture or selection of aptamers is, e. g., described in European patent EP 0 533 838. Basically the following steps are realized. First, a mixture of nucleic acids, i. e. potential aptamers, is provided whereby each nucleic acid typically comprises a segment of several, preferably at least eight subsequent randomised nucleotides. This mixture is subsequently contacted with the target molecule whereby the nucleic acid(s) bind to the target molecule, such as based on an increased affinity towards the target or with a bigger force thereto, compared to the candidate mixture. The binding nucleic acid(s) are/is subsequently separated from the remainder of the mixture. Optionally, the thus obtained nucleic acid(s) is amplified using, e. g. polymerase chain reaction. These steps may be repeated several times giving at the end a mixture having an increased ratio of nucleic acids specifically binding to the target from which the final binding nucleic acid is then optionally selected. These specifically binding nucleic acid(s) are referred to aptamers. It is obvious that at any stage of the method for the generation or identification of the aptamers samples of the mixture of individual nucleic acids may be taken to determine the sequence thereof using standard techniques. It is within the present invention that the aptamers may be stabilized such as, e. g., by introducing defined chemical groups which are known to the one skilled in the art of generating aptamers. Such modification may for example reside in the introduction of an amino group at the 2′-position of the sugar moiety of the nucleotides. Aptamers are currently used as therapeutical agents. However, it is also within the present invention that the thus selected or generated aptamers may be used for target validation and/or as lead substance for the development of medicaments, preferably of medicaments based on small molecules. This is actually done by a competition assay whereby the specific interaction between the target molecule and the aptamer is inhibited by a candidate drug whereby upon replacement of the aptamer from the complex of target and aptamer it may be assumed that the respective drug candidate allows a specific inhibition of the interaction between target and aptamer, and if the interaction is specific, said candidate drug will, at least in principle, be suitable to block the target and thus decrease its biological availability or activity in a respective system comprising such target. The thus obtained small molecule may then be subject to further derivatisation and modification to optimise its physical, chemical, biological and/or medical characteristics such as toxicity, specificity, biodegradability and bioavailability.

[0175] The generation or manufacture of spiegelmers which may be used or generated according to the present invention using the CD3 kappa peptides or a nucleic acid coding therefor, is based on a similar principle. The manufacture of spiegelmers is described in the international patent application WO 98/08856. Spiegelmers are L-nucleic acids, which means that they are composed of L-nucleotides rather than aptamers which are composed of D-nucleotides as aptamers are. Spiegelmers are characterized by the fact that they have a very high stability in biological system and, comparable to aptamers, specifically interact with the target molecule against which they are directed which is for the purpose of this invention and if not indicated to the contrary, (a/the) CD3 kappa peptide(s) and the nucleic acids coding therefor. In the purpose of generating spiegelmers, a heterogonous population of D-nucleic acids is created and this population is contacted with the optical antipode of the target molecule, in the present case for example with the D-enantiomer of the naturally occurring L-enantiomer of the CD3 kappa peptides. Subsequently, those D-nucleic acids are separated which do not interact with the optical antipode of the target molecule. However, those D-nucleic acids interacting with the optical antipode of the target molecule are separated, optionally determined and/or sequenced and subsequently the corresponding L-nucleic acids are synthesized based on the nucleic acid sequence information obtained from the D-nucleic acids. These L-nucleic acids which are identical in terms of sequence with the aforementioned D-nucleic acids interacting with the optical antipode of the target molecule will specifically interact with the naturally occurring target molecule rather than with the optical antipode thereof. Similar to the method for the generation of aptamers it is also possible to repeat the various steps several times and thus to enrich those nucleic acids specifically interacting with the optical antipode of the target molecule.

[0176] The inventors want specially emphasize that the development of spiegelmers which bind to the CD3 kappa peptides is technically feasible because CD3 kappa peptides can be synthesized from L-amino acid compounds, whereby a synthesis of CD3 kappa peptides consisting of or containing D-amino acids is procurable. These CD3 kappa peptides consisting of or containing D-amino acids can be purified to 99,999% purity and produced in high amounts. A screening to generate spiegelmers with L-nucleic acids is therefore rapidly performed. The development and application of CD3 kappa binding spiegelmers to treat autoimmune diseases as those listed in table 2 is therefore safer to perform and is safer for patients as the application of a monoclonal antibody.

[0177] A further class of compounds which may be manufactured or generating based on the CD3 kappa peptides and in particular on the nucleic acids coding therefor, as the target molecule as disclosed herein, are ribozymes, antisense oligonucleotides and siRNA.

[0178] It is a common feature of all of the aforementioned nucleic acids that they do not interact with the target molecule at the level of the translation product which are in the present case the CD3 kappa peptides, but rather interact with the transcription product, i. e. the nucleic acid coding therefor such as the genomic nucleic acid or any nucleic acid derived there from such as the corresponding hnRNA, cDNA and mRNA, respectively. Insofar, the target molecule of the aforementioned class of compounds is preferably the mRNA of CD3 kappa. Most specifically these compounds are directed against the fusion region of CD3 kappa corresponding to the region encoded by exon 1, the part of exon 2 and exon 4 to prevent effects on the expression of CD3 delta.

[0179] Ribozymes are catalytically active nucleic acids which preferably consist of RNA which basically comprises two moieties. The first moiety shows a catalytic activity whereas the second moiety is responsible for the specific interaction with the target nucleic acid, in the present case the nucleic acids coding for the CD3 kappa peptides. Upon interaction between the target nucleic acid and the second moiety of the ribozyme, typically by hybridisation and Watson-Crick base pairing of essentially complementary stretches of bases on the two hybridising strands, the catalytically active moiety may become active which means that it catalyses, either intramolecularly or intermolecularly, the target nucleic acid in case the catalytic activity of the ribozyme is a phosphodiesterase activity. Subsequently, there may be a further degradation of the target nucleic acid which in the end results in the degradation of the target nucleic acid as well as the protein derived from the said target nucleic acid which in the present case are the CD3 kappa peptides due to a lack of newly synthesized CD3 kappa peptides and a turn-over of prior existing the CD3 kappa peptides. Ribozymes, their use and design principles are known to the one skilled in the art, and, for example described in Doherty and Doudna (Ribozym structures and mechanism. Annu ref. Biophys. Biomolstruct. 2001; 30:457-75) and Lewin and Hauswirth (Ribozyme Gene Therapy: Applications for molecular medicine. 2001 7:221-8).

[0180] The use of antisense oligonucleotides for the manufacture of a medicament and as a diagnostic agent, respectively, is based on a similar mode of action. Basically, antisense oligonucleotides hybridise based on base complementarity, with a target RNA, preferably with a mRNA, thereby activate RNase H. RNase H is activated by both phosphodiester and phosphorothioate-coupled DNA. Phosphodiester-coupled DNA, however, is rapidly degraded by cellular nucleases with the exception of phosphorothioate-coupled DNA. These resistant, non-naturally occurring DNA derivatives do not inhibit RNase H upon hybridisation with RNA. In other words, antisense polynucleotides are only effective as DNA:RNA hybride complexes. Examples for this kind of antisense oligonucleotides are described, among others, in U.S.-patent U.S. Pat. No. 5,849,902 and U.S. Pat. No. 5,989,912. In other words, based on the nucleic acid sequence of the target molecule which in the present case are the nucleic acids coding for the CD3 kappa peptides, either from the target protein from which a respective nucleic acid sequence may in principle be deduced, or by knowing the nucleic acid sequence as such, particularly the mRNA, suitable antisense oligonucleotides may be designed base on the principle of base complementarity.

[0181] Particularly preferred are antisense-oligonucleotides which have a short stretch of phosphorothioate DNA (3 to 9 bases). A minimum of 3 DNA bases is required for activation of bacterial RNase H and a minimum of 5 bases is required for mammalian RNase H activation. In these chimeric oligonucleotides there is a central region that forms a substrate for RNase H that is flanked by hybridising “arms” comprised of modified nucleotides that do not form substrates for RNase H. The hybridising arms of the chimeric oligonucleotides may be modified such as by 2′-O-methyl or 2′-fluoro. Alternative approaches use methylphosphonate or phosphoramidate linkages in said arms. Further embodiments of the antisense oligonucleotide useful in the practice of the present invention are P-methoxyoligonucleotides, partial P-methoxyoligodeoxyribonucleotides or P-methoxyoligonucleotides.

[0182] Of particular relevance and usefulness for the present invention are those antisense oligonucleotides as more particularly described in the above two mentioned U.S. patents. These oligonucleotides contain no naturally occurring 5′→3′-linked nucleotides. Rather the oligonucleotides have two types of nucleotides: 2′-deoxyphosphorothioate, which activate RNase H, and 2′-modified nucleotides, which do not. The linkages between the 2′-modified nucleotides can be phosphodiesters, phosphorothioate or P-ethoxyphosphodiester. Activation of RNase H is accomplished by a contiguous RNase H-activating region, which contains between 3 and 5 2′-deoxyphosphorothioate nucleotides to activate bacterial RNase H and between 5 and 10 2′-deoxyphosphorothioate nucleotides to activate eukaryotic and, particularly, mammalian RNase H. Protection from degradation is accomplished by making the 5′ and 3′ terminal bases highly nuclease resistant and, optionally, by placing a 3′ terminal blocking group.

[0183] More particularly, the antisense oligonucleotide comprises a 5′ terminus and a 3′ terminus; and from 11 to 59 5′→3′-linked nucleotides independently selected from the group consisting of 2′-modified phosphodiester nucleotides and 2′-modified P-alkyloxyphosphotriester nucleotides; and wherein the 5′-terminal nucleoside is attached to an RNase H-activating region of between three and ten contiguous phosphorothioate-linked deoxyribonucleotides, and wherein the 3′-terminus of said oligonucleotide is selected from the group consisting of an inverted deoxyribonucleotide, a contiguous stretch of one to three phosphorothioate 2′-modified ribonucleotides, a biotin group and a P-alkyloxyphosphotriester nucleotide.

[0184] Also an antisense oligonucleotide may be used wherein not the 5′ terminal nucleoside is attached to an RNase H-activating region but the 3′ terminal nucleoside as specified above. Also, the 5′ terminus is selected from the particular group rather than the 3′ terminus of said oligonucleotide.

[0185] Suitable and useful antisense oligonucleotides are also those comprising a 5′ terminal RNase H activating region and having between 5 and 10 contiguous deoxyphosphorothioate nucleotides; between 11 to 59 contiguous 5′→3′-linked 2′-methoxyribonucleotides; and an exonuclease blocking group present at the 3′ end of the oligonucleotide that is drawn from the group consisting of a non-5′-3′-phosphodiester-linked nucleotide, from one to three contiguous 5′-3′-linked modified nucleotides and a non-nucleotide chemical blocking group.

[0186] Two classes of particularly preferred antisense oligonucleotides can be characterized as follows:

[0187] The first class of antisense oligonucleotides, also referred to herein as second generation of antisense oligonucleotides, comprises a total of 23 nucleotides comprising in 5′→3′ direction a stretch of seven 2′-O-methylribonucleotides, a stretch of nine 2′-deoxyribonucleotides, a stretch of six 2′-O-methylribonucleotides and a 3′-terminal 2′-deoxyribonucleotide. From the first group of seven 2′-O-methylribonucleotides the first four are phosphorothioate linked, whereas the subsequent four 2′-O-methylribonucleotides are phosphodiester linked. Also, there is a phosphodiester linkage between the last, i. e. the most 3′-terminal end of the 2′-O-methylribonucleotides and the first nucleotide of the stretch consisting of nine 2′-deoxyribonucleotides. All of the 2′-deoxyribonucleotides are phosphorothioate linked. A phosphorothioate linkage is also present between the last, i. e. the most 3′-terminal 2′-deoxynucleotide, and the first 2′-O-methylribonucleotide of the subsequent stretch consisting of six 2′-O-methylribonucleotides. From this group of six 2′-O-methylribonucleotides the first four of them, again in 5′→3′ direction, are phosphodiester linked, whereas the last three of them, corresponding to positions 20 to 22 are phosphorothioate linked. The last, i. e. terminal 3′-terminal 2′-deoxynucleotide is linked to the last, i. e. most 3′-terminal 2′-O-methylribonucleotide through a phosphorothioate linkage.

[0188] This first class may also be described by reference to the following schematic structure: RRRnnnnNNNNNNNNNnnnRRRN. Hereby, R indicates phosphorothioate linked 2′-O-methyl ribonucleotides (A, G, U, C); n stands for 2′-O-methyl ribonucleotides (A, G, U, C); N represents phosphorothioate linked deoxyribonucleotides (A, G, T, C).

[0189] The second class of particularly preferred antisense oligonucleotides, also referred to herein as third generation (of) antisense oligonucleotides or GeneBlocs, also comprises a total of 17 to 23 nucleotides with the following basic structure (in 5′→3′ direction).

[0190] At the 5′-terminal end there is an inverted abasic nucleotide which is a structure suitable to confer resistance against exonuclease activity and, e. g., described in WO 99/54459. This inverted abasic is linked to a stretch of five to seven 2′-O-methylribonucleotides which are phosphodiester linked. Following this stretch of five to seven 2′-O-methylribonucleotides there is a stretch of seven to nine 2′-deoxyribonucleotides all of which are phosphorothioate linked. The linkage between the last, i. e. the most 3′-terminal 2′-O-methylribonucleotide and the first 2′-deoxynucleotide of the 2′-deoxynucleotide comprising stretch occurs via a phosphodiester linkage. Adjacent to the stretch of seven to nine 2′-deoxynucleotides a stretch consistent of five to seven 2′-O-methylribonucleotides is connected. The last 2′-deoxynucleotide is linked to the first 2′-O-methylribonucleotide of the latter mentioned stretch consisting of five to seven 2′-O-methylribonucleotides occurs via a phosphorothioate linkage. The stretch of five to seven 2′-O-methylribonucleotides are phosphodiester linked. At the 3′-terminal end of the second stretch of five to seven 2′-O-methylribonucleotide another inverted abasic is attached.

[0191] This second class may also be described by reference to the following schematic structure: (GeneBlocs representing the 3rd generation of antisense oligonucleotides have also the following schematic structure:) cap-(nₚ)ₓ(Nₛ)_{y}(nₚ),-cap or cap-nnnnnnn nnnnnnn-cap Hereby, cap represents inverted deoxy abasics or similar modifications at both ends; n stands for 2′-O-methyl ribonucleotides (A, G, U, C); N represents phosphorothioate-linked deoxyribonucleoties (A, G, T, C); x represents an integer from 5 to 7; y represents an integer from 7 to 9; and z represents an integer from 5 to 7.

[0192] It is to be noted that the integers x, y and z may be chosen independently from each other although it is preferred that x and z are the same in a given antisense oligonucleotide. Accordingly, the following basic designs or structures of the antisense oligonucleotides of the third generation can be as follows: cap-(nₚ)₅(Nₛ)₇(nₚ)₅-cap, cap-(nₚ)₆(Nₛ)₇(nₚ)₅-cap, cap-(nₚ)₇(Nₛ)₇(nₚ)₅-cap, cap-(nₚ)₅(Nₛ)₈(nₚ)₅-cap, cap-(nₚ)₆(Nₛ)₈(nₚ)₅-cap, cap-(nₚ)₇(Nₛ)₈(nₚ)₅-cap, cap-(nₚ)₅(Nₛ)₉(nₚ)₅-cap, cap-(nₚ)₆(Nₛ)₉(nₚ)₅-cap, cap-(nₚ)₇(Nₛ)₉(nₚ)₅-cap, cap-(nₚ)₅(Nₛ)₇(nₚ)₆-cap, cap-(nₚ)₆(Nₛ)₇(nₚ)₆-cap, cap-(nₚ)₇(Nₛ)₇(nₚ)₆-cap, cap-(nₚ)₅(Nₛ)₈(nₚ)₆-cap, cap-(nₚ)₆(Nₛ)₈(nₚ)₆-cap, cap-(nₚ)₇(Nₛ)₈(nₚ)₆-cap, cap-(nₚ)₅(Nₛ)₉(nₚ)₆-cap, cap-(nₚ)₆(Nₛ)₉(nₚ)₆-cap, cap-(nₚ)₇(Nₛ)₉(nₚ)₆-cap, cap-(nₚ)₅(Nₛ)₇(nₚ)₇-cap, cap-(nₚ)₆(Nₛ)₇(nₚ)₇-cap, cap-(nₚ)₇(Nₛ)₇(nₚ)₇cap, cap-(nₚ)₅(Nₛ)₈(nₚ)₇-cap, cap-(nₚ)₆(Nₛ)₈(nₚ)₇-cap, cap-(nₚ)₇(Nₛ)₈(nₚ)₇-cap, cap-(nₚ)₅(Nₛ)₉(nₚ)₇-cap, cap-(nₚ)₆(Nₛ)₉(nₚ)₇-cap and cap-(nₚ)₇(Nₛ)₉(nₚ)₇-cap.

[0193] A further class of compounds which may be generated based on the technical teaching given herein and which may be used as medicaments and/or diagnostic agents are small interfering RNA (siRNA) directed to the nucleic acids, preferably mRNA, coding for the CD3 kappa peptides. siRNA is a double stranded RNA having typically a length of about 21 to about 23 nucleotides. The sequence of one of the two RNA strands corresponds to the sequence of the target nucleic acid such as the nucleic acid coding for the CD3 kappa peptides, to be degraded. Most specifically the siRNA is directed against the fusion region of CD3 kappa corresponding to the region encoded by exon 1, the part of exon 2 and exon 4 to prevent effects on the expression of CD3 delta. This kind of condiseration is, in prinicple, applicable to all of the various classes of compounds of CD3 kappa related compounds as disclosed herein and thus defines a preferred specificity thereof. In other words, knowing the nucleic acid sequences of the target molecule, in the present case the CD3 kappa peptides, preferably the mRNA sequence, a double stranded RNA may be designed with one of the two strands being complementary to said, e. g. mRNA of the CD3 kappa peptides and, upon application of said siRNA to a system containing the gene, genomic DNA, hnRNA or mRNA coding for the CD3 kappa peptides, the respective target nucleic acid will be degraded and thus the level of the respective protein be reduced. The basic principles of designing, constructing and using said siRNA as medicament and diagnostic agent, respectively, is, among others, described in international patent aplications WO 00/44895 and WO 01/75164.

[0194] Based on the aforementioned design principles, it is possible to generate such siRNA, antisense oligonucleotide and ribozyme, respectively, once the nucleic acid sequences coding for the CD3 kappa peptides are known. This is also true for precursor molecules of nucleic acid such as hnRNA, cDNA and the like, including genomic nucleic acid. Of course, also knowing the respective antisense strand may allow the design of such nucleic acid based compounds given the basic principle of base pair complementarity, preferably based on Watson-Crick base pairing. Accordingly, a further aspect of the present invention is related to specific siRNAs, ribozymes and antisense nucleotides which are directed against or specific for the CD3 kappa peptides. In the following, this is further illustrated by siRNA, however, this applies to antisense oligonucleotides and ribozymes as well, as will be acknowledged by the ones skilled in the art.

[0195] Such siRNA comprises preferably a length of from 15 to 25 nucleotides, whereby this means actually any length comprising 15, 16, 17, 18, 19, 20, 21, 22, 23, 24 or 25 nucleotides. In further embodiments, the siRNA may even exhibit more nucleotides. According the design principles well known in the art, respective siRNA can be generated. Accordingly, the siRNA claimed herein comprises a stretch of preferably any nucleotide length from 15 to 25 consecutive nucleotides which is either at least partially complementary to the sense or to the antisense strand encoding the CD3 kappa peptides, and a second ribonucleotide strand which is at least partially complementary to the first one and thus to the antisense strand and sense strand respectively, encoding the CD3 kappa peptides. Any design principle known in the art of generation or manufacture of siRNA may be applied to this kind of duplex structure. The siRNA space disclosed herein comprises siRNA molecules whereby the antisense strand of which starts with a nucleotide which corresponds to nucleotide no. 1 of a sequence coding for the CD3 kappa peptides as specified above. Further such siRNA molecules start with a nucleotide which corresponds to the nucleotide no 2 of a sequence coding for the CD3 kappa peptides as specified above, and so on. This kind of scanning over the sequence coding for the CD3 kappa peptides is repeated so as to provide all possible siRNA molecules which can be directed against the CD3 kappa peptides. The length of any of the siRNA molecules thus generated may be any length suitable for siRNA, more particularly any length as specified above. Preferably, the various siRNA molecule of the siRNA molecule space disclosed herein, overlap except the most 5′terminal nucleotide of the antisense strand or sense strand. It is obvious that the thus obtained antisense sequences have to complement through base pairing so as to form the at least partially double-stranded structure required for a functionally active siRNA

[0196] Based on the mode of action of the aforementioned classes of compounds, such as antibodies, peptides, anticalines, aptamers, spiegelmers, ribozymes, antisense oligonucleotides as well as siRNA, it is thus also within the present invention to use any of these compounds targeting the CD3 kappa peptides and the nucleic acid coding therefor, respectively, for the manufacture of a medicament or a diagnostic agent for any of the diseases as described herein and any of the diseased conditions described herein. Furthermore, these agents may be used to monitor the progression of said diseases and diseased conditions and the success of any therapy applied, respectively.

[0197] The various classes of compounds designed according to the present invention such as antibodies, peptides, anticalines, small molecules, aptamers, spiegelmers, ribozymes, antisense oligonucleotides and siRNA may also be contained in a pharmaceutical composition. Preferably such pharmaceutical composition is used for the treatment of the diseases as described herein or the diseased conditions described herein. The pharmaceutical composition may comprise in an embodiment one or several of the aforementioned classes of compounds and/or one or more members of a single class, and optionally a further pharmaceutical active compound, and a pharmaceutically acceptable carrier. Such carrier may be either liquid or solid, for example a solution, a buffer, an alcoholic solution or the like. Suitable solid carriers are, among others, starch and the like. It is known to the one skilled in the art to provide respective formulations for the various compounds according to the aforementioned classes of compounds in order to realize the particular route of administrations such as oral, parenteral, subcutaneous, intravenous, intramuscular and the like.

[0198] The various compounds of the different classes of compounds as mentioned above, may also be, either alone or in combination, subject to or contained in a kit. Such kit comprises apart from the respective compound(s) additionally one or several further elements or compounds whereby the elements are selected from the group comprising buffers, negative controls, positive controls and instructions on the use of the various compounds. Preferably, the various compounds are present in either dry or liquid form, preferably as a unit dosage for a single administration each. The kit may particularly be used for the therapy, diagnosis or monitoring of the progress of the disease or applied therapies in relation to the diseases and diseased conditions as described herein.

The present invention shall now be further illustrated by reference to the following drawings and examples from which as well as from the sequence listing, further advantages, features and embodiments may be taken.

[0199] FIGS. 1A to C show a CD3delta RT PCR visualizing the result of an expression analysis of CD3 delta splice variants, whereby more specifically
[0200] FIG. 1A shows the result of an analysis of CD3delta RT PCR samples from T cell cultures raised against cross reactive peptides 16 and 23 after 4 h stimulation, whereby mRNA from human spleen is used as control;
[0201] FIG. 1B shows the result of an analysis of CD3delta RT PCR samples from freshly isolated PBMCs from healthy donors and from patients with autoimmune diseases, whereby RA means rheumatoid arthritis with lymphocytes having been isolated from knee effusions of three patients; GBS means three patients with Guillian Barré Syndrom; CIDP means three patients with chronic inflammatory demyclating polyneuropathy;
[0202] FIG. 1C shows the result of a CD3 delta RT PCR of T cell cultures against heteroclitic peptides which were generated with dendritic cells, IL 2, IL 7 and IL 15, whereby the cell cultures have been stimulated for 4 h with the culture peptide or left untreated; and

[0203] FIG. 1D shows the genomic organization of CD3 delta and of the derived splice variant CD3 kappa;

[0204] FIG. 2a is a histogram indicating the surface expression strength of CD4+ PBMCs expressing TCR upon treatment with CD3 kappa (▪) or with a control peptide (o: same amino acid composition, but random sequence); whereby also one sample of CD4+ PBMCs expressing TCR upon treatment with CD3 kappa together with PMA and ionomycin is also shown (x);

[0205] FIG. 2b shows histograms indicating the surface expression strength of CD4+ PBMCs expressing TCR and CD4 upon treatment with CD3 kappa, whereby a kinetic ranging from two to six days is shown;

[0206] FIG. 3a is a histogram indicating the surface expression strength of PBMCs expressing surface markers CD2, CD127 and CD58 upon treatment and non treatment with CD3 kappa after six days;

[0207] FIG. 3b is a Western Blot of a dot blot microarray analysis of T cell secreted factors after various time points, whereby only significant changes cytokine expressions and double dot blots arc shown;

[0208] FIG. 3c is a Western Blot of a dot blot microarray analysis of T cell secreted factors after various time points, whereby all analyzed cytokine expression patters and double dot blots are shown;

[0209] FIG. 4a depicts histograms indicating the surface espression strength of PBMCs expressing various surface markers upon treatment and non treatment with CD3 kappa after six days;

[0210] FIG. 4b depicts histograms indicating the surface espression strength of PBMCs expressing cytokine or chemokine receptors upon treatment and non treatment with CD3 kappa after six days;

[0211] FIG. 5 is a histogram indicating the surface expression strength of CD4+ PBMCs form healthy controls and patients expressing TCR upon treatment with CD3 kappa, whereby 29 donors with normal expression range (o), 15 donors with a significantly reduced TCR expression (▪) and 6 donors with a even more significantly reduced TCR expression due to high doses of cytostatic chemotherapy (▴) are shown.

### Example 1

### Materials and Methods

### Peptide Synthesis

[0212] The purity and identity of the peptides (WITA, Teltow, Germany) was checked by reverse-phase HPLC and matrix-assisted laser desorption ionization mass spectroscopy. The 42 amino acid long CD3 kappa (SQVSPFKIPIEELEDRVFVNCNTSIYRASSLSN CRHTSSVEE) (SEQ. ID. NO. 4) had a purity of >99,9999%, while the control peptide (SESVNISTNVNRFHTFPYCEIAEVSCRSKVRIELDLQSPESS) (SEQ. ID. NO. 4438) with the same amino acid composition but a random sequence had a purity of >98%.

### Origin of Human Materials

[0213] All materials were taken from patients after informed consent. Peripheral blood mononuclear cells (PBMCs) were obtained from normal individuals (laboratory personnel). Splenocytes were isolated from spleens removed from cadaveric organ donors provided for HLA-typing and crossmatch studies in the context of liver transplantation.

[0214] Joint effusion fluids from rheumatoid arthritis patients were obtained in the context of therapeutic joint puncture.

### Preparation of PBMCs

[0215] Heparinized full blood was layered on room-temperature LSM (density: 1.077 g/ml, Cambrex, Verviers, Belgium). After centrifugation at 400 g at 20° C. for 30 minutes, the interphase cells were isolated. The cells were washed twice with 50 ml PBS containing 2 mM EDTA and centrifuged at 300 g for 10 minutes at 20° C. The cell-pellet was resuspended in RPMI supplemented with 10% autologous serum, Pen/Strep, Gentamycin, Pyruvate, Hepes-buffer and L-Glutamine (Cambrex).

### T Cell Cultures

[0216] PBMCs were used from Donor 1 (DRB1*0401,1501), Donor 2 (DRB1*1501, DRB1*1601, DQB1*0502, DQB1*0602) and Donor 3 (DRB1*0701, DRB1*1501, DQB1*0303, DQB1*0602). PBMCs were incubated with 10 μM peptide and 100 U/ml IL-2 at 5×10⁶ cells/ml for 30-40 days. 20 U/ml IL-2 was added every 4 days. The cultures were restimulated four times before analysis with the same conditions.

### Generation of Dendritic Cells and T-Cell Stimulation

[0217] The in vitro priming with Dendritic cells (DC) was performed with peptide labeled DCs generated from peripheral blood monocytes. The adherent monocytes were treated with 1000 U/ml GM-CSF (BD) and 1000 U/ml IL-4 (BD) for 8 days. Non-adherent mature DCs were activated by addition of 1000 U/ml TNFα (BD), 50 ng/ml IL-1 (BD) and 1 μM Prostaglandin E2 (Calbiochem, Schwalbach, Germany). The peptide labeled DCs (labeled with 100 μM peptide for 2 h) were mixed in a ratio of 1:50 with fresh isolated PBMCs and 100 U/ml IL-2, 50 ng/ml IL-7 (BD) and 50 ng/ml IL-15 (BD) were added. The further culture and restimulation was performed as describe above.

### CD3 Delta RT-PCR

[0218] All reagents were from Qiagen (Hilden, Germany) if not otherwise stated. 10⁷ cells were stimulated and centrifuged as in the Cytokine capture assay. The pellet was resuspended in 600 μl Buffer RLT. Samples were homogenized with QlAshredder columns and 1 volume of 70% ethanol was added. RNA was bound to RNeasy mini spin column by centrifugation for 15 sec at 8000 g, followed by one wash step with 700 μl Buffer RW1 and two wash steps with 500 μl Buffer RPE. RNA was eluted in 650 μl water, mixed with 650 μl buffer OBB and 30 μl Oligotex suspension. The samples were incubated for 3 minute at 70° C. and placed at room temperature for 10 minutes. The Oligotex:mRNA complex was pelleted by centrifugation for 2 min at 18000 g and resuspended in 600 μl Buffer OW2. The suspension was pipetted onto a spin column and washed with 600 μl Buffer OW2. mRNA was eluted with 20 μl 70° C. Buffer OEB. cDNA-synthesis was performed for 2 h at 50° C. with the following reaction mix: 2 μl 10× RT Buffer, 2 μl dNTP Mix (5 mM of each dNTP), 0.4 μl Oligo-dT primer (50 μM, Perkin Elmer), 0.5 μl Sensicript, 0.5 μl Omniscript and 14.6 μl mRNA. PCR included 12.5 μl HotStarTaq Mastermix, 0.25 μl huCD3d-5 (50 μM, TTCAAGATACCTATAGAGGAACTTGAGGAC) (SEQ. ID. NO. 4439), 0.25 μl huCD3d-3 (50 μM, TAGACCTGGTCATTCCTCAACAGAGCTTG) (SEQ. ID. NO. 4440) and 12 μl cDNA. The PCR conditions were 40 cycles of 45 sec at 96° C., 45 sec at 64° C. and 60 sec at 72° C. The PCR product was separated on a 1% agarose gel and the 220 by band excised. The DNA was isolated with QIAEX and ligated in the PCR 2.1 vector (Invitrogene, Karlsruhe, Germany). TOP10 E.Colis (Invitrogene) were transformed with the ligation product and plated with 100 μg/ml ampicillin. Plasmid minipreps of four individual clones were sequenced each two times with the PCR primers. 100% identical sequences were obtained from all eight sequencing results.

### Functional CD3 Kappa Assays

[0219] CD3 kappa or the control peptide was solubilized in RPMI with 1% human serum albumin (HSA, Calbiochem, Schwalbach, Germany) and 100 μM β-mercaptoethanol (β-ME, Invitrogene) at 10 mg/ml. PBMCs were incubated at 10⁶ cells/ml with either peptide in the same medium and stained after on wash step with PBS with various antibodies (BD).

### Protein Microarrays

[0220] All reagents were from Raybiotech (Hilden, Germany). 2 ml supernatant from cultures with 5×10⁶ cells/ml was mixed with blocking buffer (BB) and pipetted to blocked human cytokine microarrays 6.1 and 7.1. After overnight incubation, the membranes were washed three times with wash buffer I and two times with wash buffer II. Anti-cytokine antibodies were added in 2 ml BB. After incubation and wash as described above, 2 ml streptavidin-HRP was added. Again after incubation and wash as described above, detection solution was added and exposure for 18 h to X-ray films were performed.

### Example 2

### Identification of CD3 Kappa

[0221] CD 3 kappa was found in T-cell cultures upon stimulation with heteroclitic peptides resulting in an increased expression of IFN-gamma, CD4 and TCR. CD3 kappa is a splice variant of CD3 delta and was not present in T-cells which were challenged with the same heteroclitic peptide but did not increase IFN gamma production. Also, normal human splenocytes used as control showed the expected full length CD3-delta-cDNA, but not CD3 kappa and the corresponding 220 by fragment as may be taken from FIG. 1A.

[0222] The inventors also found CD3 kappa expression in peripheral blood mononuclear cells (PBMCs) from healthy donors and from patients with different autoimmune diseases. Surprisingly two of three samples from knee effusions of patients with rheumatoid arthritis showed only the expression of this 220 by band and no full length CD3delta expression as may be taken from FIG. 1B. In vitro primed T cells, stimulated with dendritic cells, IL-2, IL-7, IL-15 and loaded with cross-reactive peptides derived from a human tumor-associated antigen expressed this 220 by band, while it was lacking in the same cultures in the absence of in vitro priming (see FIGS. 1A and FIG. 1C). The 220 by variant was sequenced and identified as a novel splice variant of CD3-delta, which is missing exon 3 and a part of exon 2 but contains the complete exons 1, 4 and 5 as depicted in FIG. 1D. This alternative splicing results in a frame shift in exon 2 and yields an open reading frame of 174 bp. The resulting polypeptide has still the first 41 N-terminal amino acids of CD3 delta, including the signal peptide. However the C-terminus has a completely different sequence, whereby a transmembrane region is missing which is deemed the reason that the polypeptide is secreted. The putative CD3 kappa peptide as produced by the ribosome should thus contain 58 amino acids, including the 17 new amino acids encoded by the overlap region of exon 2 and exon 3 (SEQ. ID. NO. 1). However the hydrophobic signal peptide is removed during transfer in the endoplasmatic reticulum and therefor the secreted CD3 kappa should not contain the first 16 amino acids. We synthesized the resulting 42 amino acids polypeptide without the signal peptide.

### Example 3

### Effect of CD3 Kappa on TCR Expression

[0223] We synthesized the resulting 42 amino acids polypeptide without the signal sequence resulting in the CD3 kappa peptide having the amino acid sequence according to SEQ. ID. NO. 4. All following experiments were performed with freshly isolated PBMCs from healthy donors in the presence of the 42-mer CD3-kappa or of a control peptide (consisting of the same amino acid composition and length but with a random sequence). The CD4+ cells from three healthy donors showed a concentration dependent increase in TCR-expression after 24 h as may be taken from FIG. 2A, with a detectable TCR-upregulation after treatment with 0,1 mg/ml CD3-kappa or more. Stimulation of the cells with PMA and ionomycin did not affect this finding. The control peptide had no effect on TCR expression. Concentrations up to 1 mg/ml CD3-kappa induced a maximal response after 24h resulting in a six fold upregulation of the TCR.

[0224] Addition of CD3-kappa to PBMCs lead to a remarkable and sustained increase of TCR and CD4 expression over the next 6 days as may be taken from FIG. 2B. The TCR-expression level was stabilized after treatment with CD3-kappa in a majority of the CD4 cells, while untreated cells quickly converted to a low TCR expression state. Only at day 6 did the CD3-kappa treated cells show a decline in TCR expression. The CD4-expression was nearly completely stable over 6d after treatment with CD3-kappa while it was dramatically down regulated after 48 h in the control cultures.

### Example 4

### Impact of CD3 Kappa on Cellsurface Markers

[0225] Analysis of the cell surface markers after addition of CD3-kappa showed an increase in the expression of CD2, CD25, CD116, CD127, CCR3, CCR9 and CXCR1. CD3 kappa also leads to an slight upregulation of CXCR3 and CXCR4 as may be taken from FIGS. 3a, 4a and 4b.

[0226] CD58 was down regulated. The expression of CD38, CD44, CD45RA, CD45RO, CD62L, CD95, HLA-ABC, HLA-DR, DP, DQ and LAIR was not changed and non-T-cell markers were not affected as may be taken from FIG. 4a. The amount of EGF, Eotaxin-2, I-309, IFNγ, IL-1α, IL-1β, IL-3, IL-6, NAP-2, TGFβ3 and PARC in the supernatant was increased after CD3-kappa treatment, while the amount of IL-1ra, IL-8, RANTES, SDF-1, TARC, MCP-4, GRO, soluble IL-6 Receptor and soluble TNF-Receptor II was decreased as may be taken from FIGS. 3b and 3c.

### Example 5

### Effect of CD3 Kappa on PBMCs from Patients Recovering from T-Cell Toxic Chemotherapy

[0227] While CD3 kappa lead to a six-fold TCR upregulation in PBMCs from healthy donors, the analysis of CD3 kappa-associated TCR expression in PBMCs from patients recovering from treatment with the T-cell toxic chemotherapeutic agent fludarabine showed a dramatic decreased TCR expression which could be restored to normal levels by means of a 25-fold TCR upregulation after 48 h treatment with CD3 kappa as depicted in FIG. 5. CD3 zeta is synthesized at about 10% of the rate as the other CD3-complex proteins being the limiting component for a correct assembly of the CD3/TCR complex. A maximal upregulation of CD3 zeta can therefore result in a 10-fold upregulation of the TCR. The higher capability of CD3 kappa to upregulate the surface TCR expression might be explained with a reduced need of some of the CD3-complex components.

[0228] For the first time, we thus describe herein a molecular mechanism which may explain the increased avidity of cross-reactive T cells induced by heteroclitic peptide vaccination and possibly by molecular mimicry during autoimmune diseases. Our immune system is continuously being challenged by a myriad of pathogens, and there is a high likelihood that some of these antigens differ only slightly from self antigens. The detection of CD3 kappa expressing cells in peripheral blood of normal individuals reflects such a situation with a small number of crossreactive T cells with upregulated CD3 kappa, while the predominance of CD3 kappa bearing lymphocytes in the joint of arthritis patients reflects the expansion of a crossreactive T-cell population. The demonstration of CD3 kappa in peripheral blood lymphocytes stimulated with Dendritic cells might be due to the expansion of low affinity crossreactive T cells, which cannot be supported in the absence of Dendritic cells. Moreover our findings support the use of CD3 kappa and the derivatives described herein, including the nucleic acids coding therefor, as an adjuvant in vaccination against poorly immunogenic antigens.

[0229] The features of the present invention disclosed in the specification, the claims and/or the drawings may both separately and in any combination thereof be material for realizing the invention in various forms thereof.

1. A peptide comprising an amino acid sequence according to SEQ. ID. No 1.

2. The peptide according to claim 1, whereby the peptide comprises at least an amino acid sequence encoded by at least one exon of the CD3 gene complex or part thereof.

3. The peptide according to claim 2, whereby the amino acid sequence is encoded by exons 2 and 4 of the CD3 gene.

4. A peptide comprising an amino acid sequence according to SEQ.ID.No 4.

5. The peptide according to any of claims 1 to 4, whereby the peptide increases or prolongs the expression of the T cell receptor.

6. The peptide according to claim 5, whereby the expression is the expression of the T cell receptor on the cell surface of T cells, more specifically on the cell surface of T lymphocytes.

7. The peptide according to any of claims 1 to 6, whereby the peptide blocks or reduces internalization of the T cell receptor.

8. The peptide according to any of claims 1 to 7, whereby the peptide increases the expression of a compound selected from the group comprising CD4, CD2, CD25, CD116, CD127, CCR5, CCR9, CXCR1, CXCR3, EGF, Eotaxin-2, 1-309, IFNgamma, IL-1alpha, IL-1 beta, IL-3, IL-6, NAP-2, TGF-beta3, and PARC.

9. The peptide according to any of claims 1 to 7, whereby the peptide decreases the expression of a compound selected from the group comprising CD58, IL-1ra, IL-8, RANTES, SDF-1, TARC, MCP-4, GRO, soluble IL-6 receptor and soluble TNF-receptor II.

10. The peptide according to any of claims 1 to 9, whereby the peptide is labelled, preferably by having incorporated a labelled amino acid, whereby more preferably the labelled amino acid is radioactively labelled with tritium, C-14, 1-125 or S-35; or whereby the labelled amino acid is labelled with a NMR-active isotope, most preferably with deuterium, C-13 or N-15.

11. The peptide according to any of claims 1 to 10, whereby the peptide further comprises a moiety which is suitable for detection using a method for detection, whereby such moiety is preferably selected from the group comprising fluorophores, radioactive tracers and haptens, whereby preferably the hapten is biotin.

12. A complex comprising a peptide selected from the group comprising a peptide according to any of claims 1 to 11, and a receptor molecule selected from the group comprising the T-cell receptor, CD4, CD2, CD25, CD127, CCR5, CCR9, CXCR1, CXCR3 and the GM-CSF receptor (CD 116).

13. A nucleic acid coding for a peptide according to any of claims 1 to 11.

14. The nucleic acid according to claim 13, whereby the nucleic acid comprises a nucleic acid sequence according to SEQ.ID.No 2 or SEQ.ID.No.3, or a derivative thereof

15. The nucleic acid according to claim 14, whereby the derivative is a nucleic acid
(d) which is essentially complementary to the nucleic acid sequence according to SEQ.ID.No 2 or to SEQ.ID.No.3; or
(e) which hybridises to the nucleic acid sequence according to the nucleic acid sequence according to SEQ.ID.No.2 or SEQ.ID.No.3; or
(f) which, but for the degeneracy of the genetic code, would hybridise to the nucleic acid of (a) or (b).

16. The nucleic acid according to claim 15, whereby the hybridisation is a hybridisation under stringent conditions.

17. A vector comprising a nucleic acid according to any of claims 13 to 16, whereby the vector is preferably an expression vector.

18. The vector according to claim 17, whereby the vector is selected from the group comprising mammalian, microbial, insect and viral vectors.

19. A host cell comprising a nucleic acid according to any of claims 13 to 16 and/or a vector according to any of claims 17 to 18.

20. The host cell according to claim 19, whereby the host cell is an animal cell, preferably a mammalian cell.

21. The host cell according to claim 20, whereby if the mammalian cell is a human cell, such human cell is an in vitro human cell.

22. An organism comprising a host cell according to any of claims 19 to 21, whereby the organism is a non-human animal, preferably a non-human mammal.

23. A method for producing a peptide according to any of claims 1 to 11, comprising the following steps:
(a) cultivating a cell according to any of claims 19 to 21 in a medium under conditions which allow the production of the peptide; and
(b) harvesting the peptide; and
(c) optionally purifying the peptide.

24. Use of a peptide according to any of claims 1 to 11 for the manufacture of a medicament.

25. Use of a nucleic acid according to any of claims 13 to 16 for the manufacture of a medicament.

26. Use according to any of claims 24 to 25, whereby the medicament is for the treatment and/or prevention of a disease, whereby such disease goes along or is associated with a decreased T cell receptor expression.

27. Use according to any of claims 24 to 26, whereby the medicament is for the treatment and/or prevention of a disease, whereby such disease goes along or is associated with a decreased expression of a compound selected from the group comprising CD4, CD2, CD25, CD116, CD127, CCR5, CCR9, CXCR1, CXCR3, EGF, Eotaxin-2, 1-309, IFNgamma, IL-1alpha, IL-1 beta, IL-3, IL-6, NAP-2, TGF-beta3, and PARC.

28. Use according to any of claims 24 to 25, whereby the medicament is for the treatment and/or prevention of a disease, whereby such disease goes along or is associated with an increased expression of a compound selected from the group comprising CD58, IL-1ra, IL-8, RANTES, SDF-1, TARC, MCP-4, GRO, soluble IL-6 receptor and soluble TNF-receptor II.

29. Use according to claim 26, whereby the disease is selected from the group comprising infectious diseases.

30. Use according to claim 29, whereby the disease is selected from the group comprising HIV infection and hepatitis C infection.

31. Use according to claim 24 or 25, whereby the medicament is for the treatment and/or prevention of a disease, whereby such disease is a disease associated with or caused by an increased expression of the T cell receptor, preferably an increased expression of the T cell receptor on the surface of T lymphocytes, and more preferably such disease is selected from the group comprising autoimmune diseases.

32. Use according to claim 31, whereby the disease is selected from the group comprising rheumatoid arthritis.

33. Use according to any of claims 24 to 27, 29 and 30, whereby the medicament is for immuno-compromised or immuno suppressed patients.

34. Use according to any of claims 24 to 27, 29 and 30, whereby the medicament is for patients suffering from T cell depletion.

35. Use according to claim 34, whereby the T cell depletion is a drug induced T cell depletion, preferably a T cell depeletion induced by a chemotherapeutic agent.

36. Use according to any of claims 33 to 35, whereby the patients are subject who have or will undergo transplantation.

37. Use of a peptide according to any of claims 1 to 11 as and/or for the manufacture of an adjuvant.

38. Use of a nucleic acid according to any of claims 13 to 16 as and/or for the manufacture of an adjuvant.

39. Use according to claim 37 or 38, whereby the adjuvant is for use in vaccination, preferably in vaccination against poorly immunogenic antigens.

40. A method for the screening of an agent for the development and/or manufacture of a medicament for the treatment and/or prevention of a disease and/or for the development and/or manufacture of a diagnostic agent for the diagnosis of a disease, whereby the disease is a disease as defined in any of the preceding claims and any pathological conditions an overexpression or underexpression of the T cell receptor, comprising the steps:
a) providing a candidate compound,
b) providing an expression system for the peptide according to any of claims 1 to 11 and/or a system detecting the activity of such peptide;
c) contacting the candidate compound with the expression system for said peptide and/or the system detecting the activity of said peptide;
d) determining if the expression and/or the activity of said peptide is changed under the influence of the candidate compound.

41. The method according to claim 40, characterised in that the candidate compound is contained in a library of compounds.

42. The method according to claim 40 or 41, characterised in that the candidate compound is selected from the group of classes of compounds comprising peptides, proteins, antibodies, anticalines, functional nucleic acids, natural compounds and small molecules.

43. The method according to claim 42, characterised in that the functional nucleic acids are selected from the group which comprises aptameres, aptazymes, ribozymes, spiegelmers, antisense oligonucleotides and siRNA.

44. Use of a peptide according to any of claims 1 to 11 or a part or derivative thereof and/or nucleic acid or a part or derivative thereof coding for said peptide or a part or a derivative thereof as target molecule for the development and/or manufacture of a medicament for the treatment and/or prevention of a disease and/or for the development and/or manufacture of a diagnostic agent for the diagnosis of a disease, whereby the disease is a disease as defined in any of the proceeding claims.

45. Use according to claim 44, characterised in that the medicament and/or the diagnostic agent comprises an agent, which is selected from the group comprising antibodies, peptides, anticalines, small molecules, antisense molecules, aptameres, spiegelmers and RNAi molecules.

46. Use according to claim 45, characterised in that the agent interacts with the peptide according to any of claims 1 to 11.

47. Use according to claim 45, characterised in that the agent interacts with the nucleic acid coding for the peptide according to any of claims 1 to 11 or a part or derivative thereof, in particular with mRNA, genomic nucleic acid or cDNA for said peptide.

48. Use of a polypeptide which interacts with the peptide according to any of claims 1 to 11 or a part or derivative thereof, for the development or manufacture of a medicament for the treatment and/or prevention of a disease and/or for the development and/or manufacture of a diagnostic agent for the diagnosis of a disease, whereby the disease is a disease as defined in any of the preceding claims.

49. Use according to claim 48, characterised in that the polypeptide is selected from the group, which comprises antibodies against said peptide or a part or derivative thereof and polypeptides binding said peptide or a part or derivative thereof.

50. Use of a nucleic acid which interacts with a peptide according to any of claims 1 to 11 or a part or derivative thereof, for the development or manufacture of a medicament for the treatment and/or prevention of a disease and/or for the development and/or the manufacture of a diagnostic agent for the diagnosis of a disease, whereby the disease is a disease as defined in any of the preceding claims.

51. The use according to claim 50, characterised in that the nucleic acid is selected from the group which comprises aptamers and spiegelmers.

52. Use of a nucleic acid which interacts with a nucleic acid coding for a peptide according to any of claims 1 to 11 or a part or derivative thereof, for the development and/or manufacture of a medicament for the treatment and/or prevention of a disease and/or for the development and/or manufacture of a diagnostic agent for the diagnosis of a disease, whereby the disease is a disease as defined in any of claims 1 to 11.

53. Use according to claim 52, characterised in that the interacting nucleic acid is an antisense oligonucleotide, a ribozyme and/or siRNA.

54. Use according to claim 52 or 53, characterised in that the nucleic acid coding for the peptide or a part or derivative thereof is the cDNA, mRNA or hnRNA.

55. Use according to any of claims 44 to 54, whereby the disease is a disease associated with or caused by an increased expression of the T cell receptor, preferably an increased expression of the T cell receptor on the surface of T lymphocytes, and more preferably such disease is selected from the group comprising autoimmune diseases.

56. Pharmaceutical composition comprising at least one agent selected from the group comprising the peptide according to any of claims 1 to 11 or a part or derivative thereof, small molecules interacting with the peptide according to any of claims 1 to 11 or a part or derivative thereof or with a nucleic acid coding for the peptide according to any of claims 1 to 11 or a part or derivative thereof, antibodies specific for the peptide according to any of claims 1 to 11 or a part or derivative thereof, polypeptides interacting with the peptide according to any of claims 1 to 11 or a part or derivative thereof, a nucleic acid coding for the peptide according to any of claims 1 to 11 or a part or derivative thereof, nucleic acids interacting with the peptide according to any of claims 1 to 11 or a part or derivative thereof or nucleic acids interacting with a nucleic acid coding for the peptide according to any of claims 1 to 11 or a part or derivative thereof, and at least one pharmaceutically acceptable carrier, preferably for the prevention and/or the treatment of a disease whereby the disease is a disease as defined in any of the preceding claims.

57. Kit for the characterisation of a disease or a condition as defined in any of the preceding claims, comprising at least one agent which is selected from the group comprising the peptide according to any of claims 1 to 11 or a part or derivative thereof, antibodies specific for the peptide according to any of claims 1 to 11 or a part or derivative thereof, polypeptides interacting with the peptide according to any of claims 1 to 11 or a part or derivative thereof, polypeptides interacting with a nucleic acid coding for the peptide according to any of claims 1 to 11 or a part or derivative thereof, nucleic acids interacting with the peptide according to any of claims 1 to 11 or a part or derivative thereof, nucleic acids interacting with a nucleic acid coding for the peptide according to any of claims 1 to 11 or a part or derivative thereof, and optionally at least one other compound.

The application's sequence listing, which the Patent Office published only in electronic form, follows.

SEQUENCE LISTING (4440 sequences)

SEQ ID NO: 1 - protein, 17 aa, Homo sapiens
YRASSLSNCRHTSSVEE

SEQ ID NO: 2 - DNA, 54 bp, Homo sapiens
taccgtgcaagttcattatcgaactgccgacacacaagctctgttgaggaatga

SEQ ID NO: 3 - DNA, 177 bp, Homo sapiens
atggaacatagcacgtttctctctggcctggtactggctacccttctctcgcaagtgagccccttcaagatacctatagaggaacttgaggacagagtgtttgtgaattgcaataccagcatctaccgtgcaagttcattatcgaactgccgacacacaagctctgttgaggaatga

SEQ ID NO: 4 - protein, 42 aa, Artificial Sequence
  chemically synthesized
SQVSPFKIPIEELEDRVFVNCNTSIYRASSLSNCRHTSSVEE

SEQ ID NO: 5 - protein, 42 aa, Artificial Sequence
  chemically synthesized
TQVSPFKIPIEELEDRVFVNCNTSIYRASSLSNCRHTSSVEE

SEQ ID NO: 6 - protein, 42 aa, Artificial Sequence
  chemically synthesized
YQVSPFKIPIEELEDRVFVNCNTSIYRASSLSNCRHTSSVEE

SEQ ID NO: 7 - protein, 42 aa, Artificial Sequence
  chemically synthesized
SNVSPFKIPIEELEDRVFVNCNTSIYRASSLSNCRHTSSVEE

SEQ ID NO: 8 - protein, 42 aa, Artificial Sequence
  chemically synthesized
SQLSPFKIPIEELEDRVFVNCNTSIYRASSLSNCRHTSSVEE

SEQ ID NO: 9 - protein, 42 aa, Artificial Sequence
  chemically synthesized
SQISPFKIPIEELEDRVFVNCNTSIYRASSLSNCRHTSSVEE

SEQ ID NO: 10 - protein, 42 aa, Artificial Sequence
  chemically synthesized
SQPSPFKIPIEELEDRVFVNCNTSIYRASSLSNCRHTSSVEE

SEQ ID NO: 11 - protein, 42 aa, Artificial Sequence
  chemically synthesized
SQFSPFKIPIEELEDRVFVNCNTSIYRASSLSNCRHTSSVEE

SEQ ID NO: 12 - protein, 42 aa, Artificial Sequence
  chemically synthesized
SQVTPFKIPIEELEDRVFVNCNTSIYRASSLSNCRHTSSVEE

SEQ ID NO: 13 - protein, 42 aa, Artificial Sequence
  chemically synthesized
SQVYPFKIPIEELEDRVFVNCNTSIYRASSLSNCRHTSSVEE

SEQ ID NO: 14 - protein, 42 aa, Artificial Sequence
  chemically synthesized
SQVSPWKIPIEELEDRVFVNCNTSIYRASSLSNCRHTSSVEE

SEQ ID NO: 15 - protein, 42 aa, Artificial Sequence
  chemically synthesized
SQVSPYKIPIEELEDRVFVNCNTSIYRASSLSNCRHTSSVEE

SEQ ID NO: 16 - protein, 42 aa, Artificial Sequence
  chemically synthesized
SQVSPHKIPIEELEDRVFVNCNTSIYRASSLSNCRHTSSVEE

SEQ ID NO: 17 - protein, 42 aa, Artificial Sequence
  chemically synthesized
SQVSPFRIPIEELEDRVFVNCNTSIYRASSLSNCRHTSSVEE

SEQ ID NO: 18 - protein, 42 aa, Artificial Sequence
  chemically synthesized
SQVSPFHIPIEELEDRVFVNCNTSIYRASSLSNCRHTSSVEE

SEQ ID NO: 19 - protein, 42 aa, Artificial Sequence
  chemically synthesized
  misc_feature (7)..(7): Xaa can be a proteinogenic, non-proteinogenic or synthetic amino acid like ornithin or selenocystein
SQVSPFXIPIEELEDRVFVNCNTSIYRASSLSNCRHTSSVEE

SEQ ID NO: 20 - protein, 42 aa, Artificial Sequence
  chemically synthesized
SQVSPFKLPIEELEDRVFVNCNTSIYRASSLSNCRHTSSVEE

SEQ ID NO: 21 - protein, 42 aa, Artificial Sequence
  chemically synthesized
SQVSPFKHPIEELEDRVFVNCNTSIYRASSLSNCRHTSSVEE

SEQ ID NO: 22 - protein, 42 aa, Artificial Sequence
  chemically synthesized
SQVSPFKVPIEELEDRVFVNCNTSIYRASSLSNCRHTSSVEE

SEQ ID NO: 23 - protein, 42 aa, Artificial Sequence
  chemically synthesized
SQVSPFKFPIEELEDRVFVNCNTSIYRASSLSNCRHTSSVEE

SEQ ID NO: 24 - protein, 42 aa, Artificial Sequence
  chemically synthesized
SQVSPFKMPIEELEDRVFVNCNTSIYRASSLSNCRHTSSVEE

SEQ ID NO: 25 - protein, 42 aa, Artificial Sequence
  chemically synthesized
SQVSPFKIPLEELEDRVFVNCNTSIYRASSLSNCRHTSSVEE

SEQ ID NO: 26 - protein, 42 aa, Artificial Sequence
  chemically synthesized
SQVSPFKIPHEELEDRVFVNCNTSIYRASSLSNCRHTSSVEE

SEQ ID NO: 27 - protein, 42 aa, Artificial Sequence
  chemically synthesized
SQVSPFKIPVEELEDRVFVNCNTSIYRASSLSNCRHTSSVEE

SEQ ID NO: 28 - protein, 42 aa, Artificial Sequence
  chemically synthesized
SQVSPFKIPFEELEDRVFVNCNTSIYRASSLSNCRHTSSVEE

SEQ ID NO: 29 - protein, 42 aa, Artificial Sequence
  chemically synthesized
SQVSPFKIPMEELEDRVFVNCNTSIYRASSLSNCRHTSSVEE

SEQ ID NO: 30 - protein, 42 aa, Artificial Sequence
  chemically synthesized
SQVSPFKIPIDELEDRVFVNCNTSIYRASSLSNCRHTSSVEE

SEQ ID NO: 31 - protein, 42 aa, Artificial Sequence
  chemically synthesized
  misc_feature (11)..(11): Xaa can be a proteinogenic, non-proteinogenic or synthetic amino acid like ornithin or selenocystein
SQVSPFKIPIXELEDRVFVNCNTSIYRASSLSNCRHTSSVEE

SEQ ID NO: 32 - protein, 42 aa, Artificial Sequence
  chemically synthesized
SQVSPFKIPIEDLEDRVFVNCNTSIYRASSLSNCRHTSSVEE

SEQ ID NO: 33 - protein, 42 aa, Artificial Sequence
  chemically synthesized
  misc_feature (12)..(12): Xaa can be a proteinogenic, non-proteinogenic or synthetic amino acid like ornithin or selenocystein
SQVSPFKIPIEXLEDRVFVNCNTSIYRASSLSNCRHTSSVEE

SEQ ID NO: 34 - protein, 42 aa, Artificial Sequence
  chemically synthesized
SQVSPFKIPIEEVEDRVFVNCNTSIYRASSLSNCRHTSSVEE

SEQ ID NO: 35 - protein, 42 aa, Artificial Sequence
  chemically synthesized
SQVSPFKIPIEEIEDRVFVNCNTSIYRASSLSNCRHTSSVEE

SEQ ID NO: 36 - protein, 42 aa, Artificial Sequence
  chemically synthesized
SQVSPFKIPIEEFEDRVFVNCNTSIYRASSLSNCRHTSSVEE

SEQ ID NO: 37 - protein, 42 aa, Artificial Sequence
  chemically synthesized
SQVSPFKIPIEEHEDRVFVNCNTSIYRASSLSNCRHTSSVEE

SEQ ID NO: 38 - protein, 42 aa, Artificial Sequence
  chemically synthesized
SQVSPFKIPIEEMEDRVFVNCNTSIYRASSLSNCRHTSSVEE

SEQ ID NO: 39 - protein, 42 aa, Artificial Sequence
  chemically synthesized
SQVSPFKIPIEELDDRVFVNCNTSIYRASSLSNCRHTSSVEE

SEQ ID NO: 40 - protein, 42 aa, Artificial Sequence
  chemically synthesized
  misc_feature (14)..(14): Xaa can be a proteinogenic, non-proteinogenic or synthetic amino acid like ornithin or selenocystein
SQVSPFKIPIEELXDRVFVNCNTSIYRASSLSNCRHTSSVEE

SEQ ID NO: 41 - protein, 42 aa, Artificial Sequence
  chemically synthesized
  misc_feature (15)..(15): Xaa can be a proteinogenic, non-proteinogenic or synthetic amino acid like ornithin or selenocystein
SQVSPFKIPIEELEXRVFVNCNTSIYRASSLSNCRHTSSVEE

SEQ ID NO: 42 - protein, 42 aa, Artificial Sequence
  chemically synthesized
SQVSPFKIPIEELEERVFVNCNTSIYRASSLSNCRHTSSVEE

SEQ ID NO: 43 - protein, 42 aa, Artificial Sequence
  chemically synthesized
SQVSPFKIPIEELEDKVFVNCNTSIYRASSLSNCRHTSSVEE

SEQ ID NO: 44 - protein, 42 aa, Artificial Sequence
  chemically synthesized
SQVSPFKIPIEELEDHVFVNCNTSIYRASSLSNCRHTSSVEE

SEQ ID NO: 45 - protein, 42 aa, Artificial Sequence
  chemically synthesized
  misc_feature (16)..(16): Xaa can be a proteinogenic, non-proteinogenic or synthetic amino acid like ornithin or selenocystein
SQVSPFKIPIEELEDXVFVNCNTSIYRASSLSNCRHTSSVEE

SEQ ID NO: 46 - protein, 42 aa, Artificial Sequence
  chemically synthesized
SQVSPFKIPIEELEDRIFVNCNTSIYRASSLSNCRHTSSVEE

SEQ ID NO: 47 - protein, 42 aa, Artificial Sequence
  chemically synthesized
SQVSPFKIPIEELEDRLFVNCNTSIYRASSLSNCRHTSSVEE

SEQ ID NO: 48 - protein, 42 aa, Artificial Sequence
  chemically synthesized
SQVSPFKIPIEELEDRFFVNCNTSIYRASSLSNCRHTSSVEE

SEQ ID NO: 49 - protein, 42 aa, Artificial Sequence
  chemically synthesized
SQVSPFKIPIEELEDRHFVNCNTSIYRASSLSNCRHTSSVEE

SEQ ID NO: 50 - protein, 42 aa, Artificial Sequence
  chemically synthesized
SQVSPFKIPIEELEDRMFVNCNTSIYRASSLSNCRHTSSVEE

SEQ ID NO: 51 - protein, 42 aa, Artificial Sequence
  chemically synthesized
SQVSPFKIPIEELEDRVIVNCNTSIYRASSLSNCRHTSSVEE

SEQ ID NO: 52 - protein, 42 aa, Artificial Sequence
  chemically synthesized
SQVSPFKIPIEELEDRVLVNCNTSIYRASSLSNCRHTSSVEE

SEQ ID NO: 53 - protein, 42 aa, Artificial Sequence
  chemically synthesized
SQVSPFKIPIEELEDRVVVNCNTSIYRASSLSNCRHTSSVEE

SEQ ID NO: 54 - protein, 42 aa, Artificial Sequence
  chemically synthesized
SQVSPFKIPIEELEDRVHVNCNTSIYRASSLSNCRHTSSVEE

SEQ ID NO: 55 - protein, 42 aa, Artificial Sequence
  chemically synthesized
SQVSPFKIPIEELEDRVMVNCNTSIYRASSLSNCRHTSSVEE

SEQ ID NO: 56 - protein, 42 aa, Artificial Sequence
  chemically synthesized
SQVSPFKIPIEELEDRVFINCNTSIYRASSLSNCRHTSSVEE

SEQ ID NO: 57 - protein, 42 aa, Artificial Sequence
  chemically synthesized
SQVSPFKIPIEELEDRVFLNCNTSIYRASSLSNCRHTSSVEE

SEQ ID NO: 58 - protein, 42 aa, Artificial Sequence
  chemically synthesized
SQVSPFKIPIEELEDRVFFNCNTSIYRASSLSNCRHTSSVEE

SEQ ID NO: 59 - protein, 42 aa, Artificial Sequence
  chemically synthesized
SQVSPFKIPIEELEDRVFHNCNTSIYRASSLSNCRHTSSVEE

SEQ ID NO: 60 - protein, 42 aa, Artificial Sequence
  chemically synthesized
SQVSPFKIPIEELEDRVFMNCNTSIYRASSLSNCRHTSSVEE

SEQ ID NO: 61 - protein, 42 aa, Artificial Sequence
  chemically synthesized
SQVSPFKIPIEELEDRVFVQCNTSIYRASSLSNCRHTSSVEE

SEQ ID NO: 62 - protein, 42 aa, Artificial Sequence
  chemically synthesized
SQVSPFKIPIEELEDRVFVNSNTSIYRASSLSNCRHTSSVEE

SEQ ID NO: 63 - protein, 42 aa, Artificial Sequence
  chemically synthesized
SQVSPFKIPIEELEDRVFVNGNTSIYRASSLSNCRHTSSVEE

SEQ ID NO: 64 - protein, 42 aa, Artificial Sequence
  chemically synthesized
SQVSPFKIPIEELEDRVFVNANTSIYRASSLSNCRHTSSVEE

SEQ ID NO: 65 - protein, 42 aa, Artificial Sequence
  chemically synthesized
SQVSPFKIPIEELEDRVFVNCQTSIYRASSLSNCRHTSSVEE

SEQ ID NO: 66 - protein, 42 aa, Artificial Sequence
  chemically synthesized
SQVSPFKIPIEELEDRVFVNCNSSIYRASSLSNCRHTSSVEE

SEQ ID NO: 67 - protein, 42 aa, Artificial Sequence
  chemically synthesized
SQVSPFKIPIEELEDRVFVNCNYSIYRASSLSNCRHTSSVEE

SEQ ID NO: 68 - protein, 42 aa, Artificial Sequence
  chemically synthesized
SQVSPFKIPIEELEDRVFVNCNTTIYRASSLSNCRHTSSVEE

SEQ ID NO: 69 - protein, 42 aa, Artificial Sequence
  chemically synthesized
SQVSPFKIPIEELEDRVFVNCNTYIYRASSLSNCRHTSSVEE

SEQ ID NO: 70 - protein, 42 aa, Artificial Sequence
  chemically synthesized
SQVSPFKIPIEELEDRVFVNCNTSVYRASSLSNCRHTSSVEE

SEQ ID NO: 71 - protein, 42 aa, Artificial Sequence
  chemically synthesized
SQVSPFKIPIEELEDRVFVNCNTSLYRASSLSNCRHTSSVEE

SEQ ID NO: 72 - protein, 42 aa, Artificial Sequence
  chemically synthesized
SQVSPFKIPIEELEDRVFVNCNTSHYRASSLSNCRHTSSVEE

SEQ ID NO: 73 - protein, 42 aa, Artificial Sequence
  chemically synthesized
SQVSPFKIPIEELEDRVFVNCNTSFYRASSLSNCRHTSSVEE

SEQ ID NO: 74 - protein, 42 aa, Artificial Sequence
  chemically synthesized
SQVSPFKIPIEELEDRVFVNCNTSMYRASSLSNCRHTSSVEE

SEQ ID NO: 75 - protein, 42 aa, Artificial Sequence
  chemically synthesized
SQVSPFKIPIEELEDRVFVNCNTSIWRASSLSNCRHTSSVEE

SEQ ID NO: 76 - protein, 42 aa, Artificial Sequence
  chemically synthesized
SQVSPFKIPIEELEDRVFVNCNTSIFRASSLSNCRHTSSVEE

SEQ ID NO: 77 - protein, 42 aa, Artificial Sequence
  chemically synthesized
SQVSPFKIPIEELEDRVFVNCNTSISRASSLSNCRHTSSVEE

SEQ ID NO: 78 - protein, 42 aa, Artificial Sequence
  chemically synthesized
SQVSPFKIPIEELEDRVFVNCNTSITRASSLSNCRHTSSVEE

SEQ ID NO: 79 - protein, 42 aa, Artificial Sequence
  chemically synthesized
  misc_feature (27)..(27): Xaa can be a proteinogenic, non-proteinogenic or synthetic amino acid like ornithin or selenocystein
SQVSPFKIPIEELEDRVFVNCNTSIYXASSLSNCRHTSSVEE

SEQ ID NO: 80 - protein, 42 aa, Artificial Sequence
  chemically synthesized
SQVSPFKIPIEELEDRVFVNCNTSIYHASSLSNCRHTSSVEE

SEQ ID NO: 81 - protein, 42 aa, Artificial Sequence
  chemically synthesized
SQVSPFKIPIEELEDRVFVNCNTSIYKASSLSNCRHTSSVEE

SEQ ID NO: 82 - protein, 42 aa, Artificial Sequence
  chemically synthesized
SQVSPFKIPIEELEDRVFVNCNTSIYRGSSLSNCRHTSSVEE

SEQ ID NO: 83 - protein, 42 aa, Artificial Sequence
  chemically synthesized
SQVSPFKIPIEELEDRVFVNCNTSIYRATSLSNCRHTSSVEE

SEQ ID NO: 84 - protein, 42 aa, Artificial Sequence
  chemically synthesized
SQVSPFKIPIEELEDRVFVNCNTSIYRAYSLSNCRHTSSVEE

SEQ ID NO: 85 - protein, 42 aa, Artificial Sequence
  chemically synthesized
SQVSPFKIPIEELEDRVFVNCNTSIYRASTLSNCRHTSSVEE

SEQ ID NO: 86 - protein, 42 aa, Artificial Sequence
  chemically synthesized
SQVSPFKIPIEELEDRVFVNCNTSIYRASYLSNCRHTSSVEE

SEQ ID NO: 87 - protein, 42 aa, Artificial Sequence
  chemically synthesized
SQVSPFKIPIEELEDRVFVNCNTSIYRASSISNCRHTSSVEE

SEQ ID NO: 88 - protein, 42 aa, Artificial Sequence
  chemically synthesized
SQVSPFKIPIEELEDRVFVNCNTSIYRASSVSNCRHTSSVEE

SEQ ID NO: 89 - protein, 42 aa, Artificial Sequence
  chemically synthesized
SQVSPFKIPIEELEDRVFVNCNTSIYRASSFSNCRHTSSVEE

SEQ ID NO: 90 - protein, 42 aa, Artificial Sequence
  chemically synthesized
SQVSPFKIPIEELEDRVFVNCNTSIYRASSMSNCRHTSSVEE

SEQ ID NO: 91 - protein, 42 aa, Artificial Sequence
  chemically synthesized
SQVSPFKIPIEELEDRVFVNCNTSIYRASSHSNCRHTSSVEE

SEQ ID NO: 92 - protein, 42 aa, Artificial Sequence
  chemically synthesized
SQVSPFKIPIEELEDRVFVNCNTSIYRASSLTNCRHTSSVEE

SEQ ID NO: 93 - protein, 42 aa, Artificial Sequence
  chemically synthesized
SQVSPFKIPIEELEDRVFVNCNTSIYRASSLYNCRHTSSVEE

SEQ ID NO: 94 - protein, 42 aa, Artificial Sequence
  chemically synthesized
SQVSPFKIPIEELEDRVFVNCNTSIYRASSLSQCRHTSSVEE

SEQ ID NO: 95 - protein, 42 aa, Artificial Sequence
  chemically synthesized
SQVSPFKIPIEELEDRVFVNCNTSIYRASSLSNSRHTSSVEE

SEQ ID NO: 96 - protein, 42 aa, Artificial Sequence
  chemically synthesized
SQVSPFKIPIEELEDRVFVNCNTSIYRASSLSNGRHTSSVEE

SEQ ID NO: 97 - protein, 42 aa, Artificial Sequence
  chemically synthesized
SQVSPFKIPIEELEDRVFVNCNTSIYRASSLSNARHTSSVEE

SEQ ID NO: 98 - protein, 42 aa, Artificial Sequence
  chemically synthesized
  misc_feature (35)..(35): Xaa can be a proteinogenic, non-proteinogenic or synthetic amino acid like ornithin or selenocystein
SQVSPFKIPIEELEDRVFVNCNTSIYRASSLSNCXHTSSVEE

SEQ ID NO: 99 - protein, 42 aa, Artificial Sequence
  chemically synthesized
SQVSPFKIPIEELEDRVFVNCNTSIYRASSLSNCHHTSSVEE

SEQ ID NO: 100 - protein, 42 aa, Artificial Sequence
  chemically synthesized
SQVSPFKIPIEELEDRVFVNCNTSIYRASSLSNCKHTSSVEE

SEQ ID NO: 101 - protein, 42 aa, Artificial Sequence
  chemically synthesized
SQVSPFKIPIEELEDRVFVNCNTSIYRASSLSNCRGTSSVEE

SEQ ID NO: 102 - protein, 42 aa, Artificial Sequence
  chemically synthesized
SQVSPFKIPIEELEDRVFVNCNTSIYRASSLSNCRATSSVEE

SEQ ID NO: 103 - protein, 42 aa, Artificial Sequence
  chemically synthesized
SQVSPFKIPIEELEDRVFVNCNTSIYRASSLSNCRITSSVEE

SEQ ID NO: 104 - protein, 42 aa, Artificial Sequence
  chemically synthesized
SQVSPFKIPIEELEDRVFVNCNTSIYRASSLSNCRLTSSVEE

SEQ ID NO: 105 - protein, 42 aa, Artificial Sequence
  chemically synthesized
SQVSPFKIPIEELEDRVFVNCNTSIYRASSLSNCRMTSSVEE

SEQ ID NO: 106 - protein, 42 aa, Artificial Sequence
  chemically synthesized
SQVSPFKIPIEELEDRVFVNCNTSIYRASSLSNCRVTSSVEE

SEQ ID NO: 107 - protein, 42 aa, Artificial Sequence
  chemically synthesized
SQVSPFKIPIEELEDRVFVNCNTSIYRASSLSNCRHSSSVEE

SEQ ID NO: 108 - protein, 42 aa, Artificial Sequence
  chemically synthesized
SQVSPFKIPIEELEDRVFVNCNTSIYRASSLSNCRHYSSVEE

SEQ ID NO: 109 - protein, 42 aa, Artificial Sequence
  chemically synthesized
SQVSPFKIPIEELEDRVFVNCNTSIYRASSLSNCRHTTSVEE

SEQ ID NO: 110 - protein, 42 aa, Artificial Sequence
  chemically synthesized
SQVSPFKIPIEELEDRVFVNCNTSIYRASSLSNCRHTYSVEE

SEQ ID NO: 111 - protein, 42 aa, Artificial Sequence
  chemically synthesized
SQVSPFKIPIEELEDRVFVNCNTSIYRASSLSNCRHTSTVEE

SEQ ID NO: 112 - protein, 42 aa, Artificial Sequence
  chemically synthesized
SQVSPFKIPIEELEDRVFVNCNTSIYRASSLSNCRHTSYVEE

SEQ ID NO: 113 - protein, 42 aa, Artificial Sequence
  chemically synthesized
SQVSPFKIPIEELEDRVFVNCNTSIYRASSLSNCRHTSSIEE

SEQ ID NO: 114 - protein, 42 aa, Artificial Sequence
  chemically synthesized
SQVSPFKIPIEELEDRVFVNCNTSIYRASSLSNCRHTSSLEE

SEQ ID NO: 115 - protein, 42 aa, Artificial Sequence
  chemically synthesized
SQVSPFKIPIEELEDRVFVNCNTSIYRASSLSNCRHTSSFEE

SEQ ID NO: 116 - protein, 42 aa, Artificial Sequence
  chemically synthesized
SQVSPFKIPIEELEDRVFVNCNTSIYRASSLSNCRHTSSHEE

SEQ ID NO: 117 - protein, 42 aa, Artificial Sequence
  chemically synthesized
SQVSPFKIPIEELEDRVFVNCNTSIYRASSLSNCRHTSSMEE

SEQ ID NO: 118 - protein, 42 aa, Artificial Sequence
  chemically synthesized
SQVSPFKIPIEELEDRVFVNCNTSIYRASSLSNCRHTSSVDE

SEQ ID NO: 119 - protein, 42 aa, Artificial Sequence
  chemically synthesized
  misc_feature (41)..(41): Xaa can be a proteinogenic, non-proteinogenic or synthetic amino acid like ornithin or selenocystein
SQVSPFKIPIEELEDRVFVNCNTSIYRASSLSNCRHTSSVXE

SEQ ID NO: 120 - protein, 42 aa, Artificial Sequence
  chemically synthesized
SQVSPFKIPIEELEDRVFVNCNTSIYRASSLSNCRHTSSVED

SEQ ID NO: 121 - protein, 42 aa, Artificial Sequence
  chemically synthesized
  misc_feature (42)..(42): Xaa can be a proteinogenic, non-proteinogenic or synthetic amino acid like ornithin or selenocystein
SQVSPFKIPIEELEDRVFVNCNTSIYRASSLSNCRHTSSVEX

SEQ ID NO: 122 - protein, 42 aa, Artificial Sequence
  chemically synthesized
SQVSAFKIPIEELEDRVFVNCNTSIYRASSLSNCRHTSSVEE

SEQ ID NO: 123 - protein, 42 aa, Artificial Sequence
  chemically synthesized
SQVSGFKIPIEELEDRVFVNCNTSIYRASSLSNCRHTSSVEE

SEQ ID NO: 124 - protein, 42 aa, Artificial Sequence
  chemically synthesized
SQVSPFKIAIEELEDRVFVNCNTSIYRASSLSNCRHTSSVEE

SEQ ID NO: 125 - protein, 42 aa, Artificial Sequence
  chemically synthesized
SQVSPFKIGIEELEDRVFVNCNTSIYRASSLSNCRHTSSVEE

SEQ ID NO: 126 - protein, 42 aa, Artificial Sequence
  chemically synthesized
TNVSPFKIPIEELEDRVFVNCNTSIYRASSLSNCRHTSSVEE

SEQ ID NO: 127 - protein, 42 aa, Artificial Sequence
  chemically synthesized
TQLSPFKIPIEELEDRVFVNCNTSIYRASSLSNCRHTSSVEE

SEQ ID NO: 128 - protein, 42 aa, Artificial Sequence
  chemically synthesized
TQISPFKIPIEELEDRVFVNCNTSIYRASSLSNCRHTSSVEE

SEQ ID NO: 129 - protein, 42 aa, Artificial Sequence
  chemically synthesized
TQPSPFKIPIEELEDRVFVNCNTSIYRASSLSNCRHTSSVEE

SEQ ID NO: 130 - protein, 42 aa, Artificial Sequence
  chemically synthesized
TQFSPFKIPIEELEDRVFVNCNTSIYRASSLSNCRHTSSVEE

SEQ ID NO: 131 - protein, 42 aa, Artificial Sequence
  chemically synthesized
TQVTPFKIPIEELEDRVFVNCNTSIYRASSLSNCRHTSSVEE

SEQ ID NO: 132 - protein, 42 aa, Artificial Sequence
  chemically synthesized
TQVYPFKIPIEELEDRVFVNCNTSIYRASSLSNCRHTSSVEE

SEQ ID NO: 133 - protein, 42 aa, Artificial Sequence
  chemically synthesized
TQVSPWKIPIEELEDRVFVNCNTSIYRASSLSNCRHTSSVEE

SEQ ID NO: 134 - protein, 42 aa, Artificial Sequence
  chemically synthesized
TQVSPYKIPIEELEDRVFVNCNTSIYRASSLSNCRHTSSVEE

SEQ ID NO: 135 - protein, 42 aa, Artificial Sequence
  chemically synthesized
TQVSPHKIPIEELEDRVFVNCNTSIYRASSLSNCRHTSSVEE

SEQ ID NO: 136 - protein, 42 aa, Artificial Sequence
  chemically synthesized
TQVSPFRIPIEELEDRVFVNCNTSIYRASSLSNCRHTSSVEE

SEQ ID NO: 137 - protein, 42 aa, Artificial Sequence
  chemically synthesized
TQVSPFHIPIEELEDRVFVNCNTSIYRASSLSNCRHTSSVEE

SEQ ID NO: 138 - protein, 42 aa, Artificial Sequence
  chemically synthesized
  misc_feature (7)..(7): Xaa can be a proteinogenic, non-proteinogenic or synthetic amino acid like ornithin or selenocystein
TQVSPFXIPIEELEDRVFVNCNTSIYRASSLSNCRHTSSVEE

SEQ ID NO: 139 - protein, 42 aa, Artificial Sequence
  chemically synthesized
TQVSPFKLPIEELEDRVFVNCNTSIYRASSLSNCRHTSSVEE

SEQ ID NO: 140 - protein, 42 aa, Artificial Sequence
  chemically synthesized
TQVSPFKHPIEELEDRVFVNCNTSIYRASSLSNCRHTSSVEE

SEQ ID NO: 141 - protein, 42 aa, Artificial Sequence
  chemically synthesized
TQVSPFKVPIEELEDRVFVNCNTSIYRASSLSNCRHTSSVEE

SEQ ID NO: 142 - protein, 42 aa, Artificial Sequence
  chemically synthesized
TQVSPFKFPIEELEDRVFVNCNTSIYRASSLSNCRHTSSVEE

SEQ ID NO: 143 - protein, 42 aa, Artificial Sequence
  chemically synthesized
TQVSPFKMPIEELEDRVFVNCNTSIYRASSLSNCRHTSSVEE

SEQ ID NO: 144 - protein, 42 aa, Artificial Sequence
  chemically synthesized
TQVSPFKIPLEELEDRVFVNCNTSIYRASSLSNCRHTSSVEE

SEQ ID NO: 145 - protein, 42 aa, Artificial Sequence
  chemically synthesized
TQVSPFKIPHEELEDRVFVNCNTSIYRASSLSNCRHTSSVEE

SEQ ID NO: 146 - protein, 42 aa, Artificial Sequence
  chemically synthesized
TQVSPFKIPVEELEDRVFVNCNTSIYRASSLSNCRHTSSVEE

SEQ ID NO: 147 - protein, 42 aa, Artificial Sequence
  chemically synthesized
TQVSPFKIPFEELEDRVFVNCNTSIYRASSLSNCRHTSSVEE

SEQ ID NO: 148 - protein, 42 aa, Artificial Sequence
  chemically synthesized
TQVSPFKIPMEELEDRVFVNCNTSIYRASSLSNCRHTSSVEE

SEQ ID NO: 149 - protein, 42 aa, Artificial Sequence
  chemically synthesized
TQVSPFKIPIDELEDRVFVNCNTSIYRASSLSNCRHTSSVEE

SEQ ID NO: 150 - protein, 42 aa, Artificial Sequence
  chemically synthesized
  misc_feature (11)..(11): Xaa can be a proteinogenic, non-proteinogenic or synthetic amino acid like ornithin or selenocystein
TQVSPFKIPIXELEDRVFVNCNTSIYRASSLSNCRHTSSVEE

SEQ ID NO: 151 - protein, 42 aa, Artificial Sequence
  chemically synthesized
TQVSPFKIPIEDLEDRVFVNCNTSIYRASSLSNCRHTSSVEE

SEQ ID NO: 152 - protein, 42 aa, Artificial Sequence
  chemically synthesized
  misc_feature (12)..(12): Xaa can be a proteinogenic, non-proteinogenic or synthetic amino acid like ornithin or selenocystein
TQVSPFKIPIEXLEDRVFVNCNTSIYRASSLSNCRHTSSVEE

SEQ ID NO: 153 - protein, 42 aa, Artificial Sequence
  chemically synthesized
TQVSPFKIPIEEVEDRVFVNCNTSIYRASSLSNCRHTSSVEE

SEQ ID NO: 154 - protein, 42 aa, Artificial Sequence
  chemically synthesized
TQVSPFKIPIEEIEDRVFVNCNTSIYRASSLSNCRHTSSVEE

SEQ ID NO: 155 - protein, 42 aa, Artificial Sequence
  chemically synthesized
TQVSPFKIPIEEFEDRVFVNCNTSIYRASSLSNCRHTSSVEE

SEQ ID NO: 156 - protein, 42 aa, Artificial Sequence
  chemically synthesized
TQVSPFKIPIEEHEDRVFVNCNTSIYRASSLSNCRHTSSVEE

SEQ ID NO: 157 - protein, 42 aa, Artificial Sequence
  chemically synthesized
TQVSPFKIPIEEMEDRVFVNCNTSIYRASSLSNCRHTSSVEE

SEQ ID NO: 158 - protein, 42 aa, Artificial Sequence
  chemically synthesized
TQVSPFKIPIEELDDRVFVNCNTSIYRASSLSNCRHTSSVEE

SEQ ID NO: 159 - protein, 42 aa, Artificial Sequence
  chemically synthesized
  misc_feature (14)..(14): Xaa can be a proteinogenic, non-proteinogenic or synthetic amino acid like ornithin or selenocystein
TQVSPFKIPIEELXDRVFVNCNTSIYRASSLSNCRHTSSVEE

SEQ ID NO: 160 - protein, 42 aa, Artificial Sequence
  chemically synthesized
  misc_feature (15)..(15): Xaa can be a proteinogenic, non-proteinogenic or synthetic amino acid like ornithin or selenocystein
TQVSPFKIPIEELEXRVFVNCNTSIYRASSLSNCRHTSSVEE

SEQ ID NO: 161 - protein, 42 aa, Artificial Sequence
  chemically synthesized
TQVSPFKIPIEELEERVFVNCNTSIYRASSLSNCRHTSSVEE

SEQ ID NO: 162 - protein, 42 aa, Artificial Sequence
  chemically synthesized
TQVSPFKIPIEELEDKVFVNCNTSIYRASSLSNCRHTSSVEE

SEQ ID NO: 163 - protein, 42 aa, Artificial Sequence
  chemically synthesized
TQVSPFKIPIEELEDHVFVNCNTSIYRASSLSNCRHTSSVEE

SEQ ID NO: 164 - protein, 42 aa, Artificial Sequence
  chemically synthesized
  misc_feature (16)..(16): Xaa can be a proteinogenic, non-proteinogenic or synthetic amino acid like ornithin or selenocystein
TQVSPFKIPIEELEDXVFVNCNTSIYRASSLSNCRHTSSVEE

SEQ ID NO: 165 - protein, 42 aa, Artificial Sequence
  chemically synthesized
TQVSPFKIPIEELEDRIFVNCNTSIYRASSLSNCRHTSSVEE

SEQ ID NO: 166 - protein, 42 aa, Artificial Sequence
  chemically synthesized
TQVSPFKIPIEELEDRLFVNCNTSIYRASSLSNCRHTSSVEE

SEQ ID NO: 167 - protein, 42 aa, Artificial Sequence
  chemically synthesized
TQVSPFKIPIEELEDRFFVNCNTSIYRASSLSNCRHTSSVEE

SEQ ID NO: 168 - protein, 42 aa, Artificial Sequence
  chemically synthesized
TQVSPFKIPIEELEDRHFVNCNTSIYRASSLSNCRHTSSVEE

SEQ ID NO: 169 - protein, 42 aa, Artificial Sequence
  chemically synthesized
TQVSPFKIPIEELEDRMFVNCNTSIYRASSLSNCRHTSSVEE

SEQ ID NO: 170 - protein, 42 aa, Artificial Sequence
  chemically synthesized
TQVSPFKIPIEELEDRVIVNCNTSIYRASSLSNCRHTSSVEE

SEQ ID NO: 171 - protein, 42 aa, Artificial Sequence
  chemically synthesized
TQVSPFKIPIEELEDRVLVNCNTSIYRASSLSNCRHTSSVEE

SEQ ID NO: 172 - protein, 42 aa, Artificial Sequence
  chemically synthesized
TQVSPFKIPIEELEDRVVVNCNTSIYRASSLSNCRHTSSVEE

SEQ ID NO: 173 - protein, 42 aa, Artificial Sequence
  chemically synthesized
TQVSPFKIPIEELEDRVHVNCNTSIYRASSLSNCRHTSSVEE

SEQ ID NO: 174 - protein, 42 aa, Artificial Sequence
  chemically synthesized
TQVSPFKIPIEELEDRVMVNCNTSIYRASSLSNCRHTSSVEE

SEQ ID NO: 175 - protein, 42 aa, Artificial Sequence
  chemically synthesized
TQVSPFKIPIEELEDRVFINCNTSIYRASSLSNCRHTSSVEE

SEQ ID NO: 176 - protein, 42 aa, Artificial Sequence
  chemically synthesized
TQVSPFKIPIEELEDRVFLNCNTSIYRASSLSNCRHTSSVEE

SEQ ID NO: 177 - protein, 42 aa, Artificial Sequence
  chemically synthesized
TQVSPFKIPIEELEDRVFFNCNTSIYRASSLSNCRHTSSVEE

SEQ ID NO: 178 - protein, 42 aa, Artificial Sequence
  chemically synthesized
TQVSPFKIPIEELEDRVFHNCNTSIYRASSLSNCRHTSSVEE

SEQ ID NO: 179 - protein, 42 aa, Artificial Sequence
  chemically synthesized
TQVSPFKIPIEELEDRVFMNCNTSIYRASSLSNCRHTSSVEE

SEQ ID NO: 180 - protein, 42 aa, Artificial Sequence
  chemically synthesized
TQVSPFKIPIEELEDRVFVQCNTSIYRASSLSNCRHTSSVEE

SEQ ID NO: 181 - protein, 42 aa, Artificial Sequence
  chemically synthesized
TQVSPFKIPIEELEDRVFVNSNTSIYRASSLSNCRHTSSVEE

SEQ ID NO: 182 - protein, 42 aa, Artificial Sequence
  chemically synthesized
TQVSPFKIPIEELEDRVFVNGNTSIYRASSLSNCRHTSSVEE

SEQ ID NO: 183 - protein, 42 aa, Artificial Sequence
  chemically synthesized
TQVSPFKIPIEELEDRVFVNANTSIYRASSLSNCRHTSSVEE

SEQ ID NO: 184 - protein, 42 aa, Artificial Sequence
  chemically synthesized
TQVSPFKIPIEELEDRVFVNCQTSIYRASSLSNCRHTSSVEE

SEQ ID NO: 185 - protein, 42 aa, Artificial Sequence
  chemically synthesized
TQVSPFKIPIEELEDRVFVNCNSSIYRASSLSNCRHTSSVEE

SEQ ID NO: 186 - protein, 42 aa, Artificial Sequence
  chemically synthesized
TQVSPFKIPIEELEDRVFVNCNYSIYRASSLSNCRHTSSVEE

SEQ ID NO: 187 - protein, 42 aa, Artificial Sequence
  chemically synthesized
TQVSPFKIPIEELEDRVFVNCNTTIYRASSLSNCRHTSSVEE

SEQ ID NO: 188 - protein, 42 aa, Artificial Sequence
  chemically synthesized
TQVSPFKIPIEELEDRVFVNCNTYIYRASSLSNCRHTSSVEE

SEQ ID NO: 189 - protein, 42 aa, Artificial Sequence
  chemically synthesized
TQVSPFKIPIEELEDRVFVNCNTSVYRASSLSNCRHTSSVEE

SEQ ID NO: 190 - protein, 42 aa, Artificial Sequence
  chemically synthesized
TQVSPFKIPIEELEDRVFVNCNTSLYRASSLSNCRHTSSVEE

SEQ ID NO: 191 - protein, 42 aa, Artificial Sequence
  chemically synthesized
TQVSPFKIPIEELEDRVFVNCNTSHYRASSLSNCRHTSSVEE

SEQ ID NO: 192 - protein, 42 aa, Artificial Sequence
  chemically synthesized
TQVSPFKIPIEELEDRVFVNCNTSFYRASSLSNCRHTSSVEE

SEQ ID NO: 193 - protein, 42 aa, Artificial Sequence
  chemically synthesized
TQVSPFKIPIEELEDRVFVNCNTSMYRASSLSNCRHTSSVEE

SEQ ID NO: 194 - protein, 42 aa, Artificial Sequence
  chemically synthesized
TQVSPFKIPIEELEDRVFVNCNTSIWRASSLSNCRHTSSVEE

SEQ ID NO: 195 - protein, 42 aa, Artificial Sequence
  chemically synthesized
TQVSPFKIPIEELEDRVFVNCNTSIFRASSLSNCRHTSSVEE

SEQ ID NO: 196 - protein, 42 aa, Artificial Sequence
  chemically synthesized
TQVSPFKIPIEELEDRVFVNCNTSISRASSLSNCRHTSSVEE

SEQ ID NO: 197 - protein, 42 aa, Artificial Sequence
  chemically synthesized
TQVSPFKIPIEELEDRVFVNCNTSITRASSLSNCRHTSSVEE

SEQ ID NO: 198 - protein, 42 aa, Artificial Sequence
  chemically synthesized
  misc_feature (27)..(27): Xaa can be a proteinogenic, non-proteinogenic or synthetic amino acid like ornithin or selenocystein
TQVSPFKIPIEELEDRVFVNCNTSIYXASSLSNCRHTSSVEE

SEQ ID NO: 199 - protein, 42 aa, Artificial Sequence
  chemically synthesized
TQVSPFKIPIEELEDRVFVNCNTSIYHASSLSNCRHTSSVEE

SEQ ID NO: 200 - protein, 42 aa, Artificial Sequence
  chemically synthesized
TQVSPFKIPIEELEDRVFVNCNTSIYKASSLSNCRHTSSVEE

SEQ ID NO: 201 - protein, 42 aa, Artificial Sequence
  chemically synthesized
TQVSPFKIPIEELEDRVFVNCNTSIYRGSSLSNCRHTSSVEE

SEQ ID NO: 202 - protein, 42 aa, Artificial Sequence
  chemically synthesized
TQVSPFKIPIEELEDRVFVNCNTSIYRATSLSNCRHTSSVEE

SEQ ID NO: 203 - protein, 42 aa, Artificial Sequence
  chemically synthesized
TQVSPFKIPIEELEDRVFVNCNTSIYRAYSLSNCRHTSSVEE

SEQ ID NO: 204 - protein, 42 aa, Artificial Sequence
  chemically synthesized
TQVSPFKIPIEELEDRVFVNCNTSIYRASTLSNCRHTSSVEE

SEQ ID NO: 205 - protein, 42 aa, Artificial Sequence
  chemically synthesized
TQVSPFKIPIEELEDRVFVNCNTSIYRASYLSNCRHTSSVEE

SEQ ID NO: 206 - protein, 42 aa, Artificial Sequence
  chemically synthesized
TQVSPFKIPIEELEDRVFVNCNTSIYRASSISNCRHTSSVEE

SEQ ID NO: 207 - protein, 42 aa, Artificial Sequence
  chemically synthesized
TQVSPFKIPIEELEDRVFVNCNTSIYRASSVSNCRHTSSVEE

SEQ ID NO: 208 - protein, 42 aa, Artificial Sequence
  chemically synthesized
TQVSPFKIPIEELEDRVFVNCNTSIYRASSFSNCRHTSSVEE

SEQ ID NO: 209 - protein, 42 aa, Artificial Sequence
  chemically synthesized
TQVSPFKIPIEELEDRVFVNCNTSIYRASSMSNCRHTSSVEE

SEQ ID NO: 210 - protein, 42 aa, Artificial Sequence
  chemically synthesized
TQVSPFKIPIEELEDRVFVNCNTSIYRASSHSNCRHTSSVEE

SEQ ID NO: 211 - protein, 42 aa, Artificial Sequence
  chemically synthesized
TQVSPFKIPIEELEDRVFVNCNTSIYRASSLTNCRHTSSVEE

SEQ ID NO: 212 - protein, 42 aa, Artificial Sequence
  chemically synthesized
TQVSPFKIPIEELEDRVFVNCNTSIYRASSLYNCRHTSSVEE

SEQ ID NO: 213 - protein, 42 aa, Artificial Sequence
  chemically synthesized
TQVSPFKIPIEELEDRVFVNCNTSIYRASSLSQCRHTSSVEE

SEQ ID NO: 214 - protein, 42 aa, Artificial Sequence
  chemically synthesized
TQVSPFKIPIEELEDRVFVNCNTSIYRASSLSNSRHTSSVEE

SEQ ID NO: 215 - protein, 42 aa, Artificial Sequence
  chemically synthesized
TQVSPFKIPIEELEDRVFVNCNTSIYRASSLSNGRHTSSVEE

SEQ ID NO: 216 - protein, 42 aa, Artificial Sequence
  chemically synthesized
TQVSPFKIPIEELEDRVFVNCNTSIYRASSLSNARHTSSVEE

SEQ ID NO: 217 - protein, 42 aa, Artificial Sequence
  chemically synthesized
  misc_feature (35)..(35): Xaa can be a proteinogenic, non-proteinogenic or synthetic amino acid like ornithin or selenocystein
TQVSPFKIPIEELEDRVFVNCNTSIYRASSLSNCXHTSSVEE

SEQ ID NO: 218 - protein, 42 aa, Artificial Sequence
  chemically synthesized
TQVSPFKIPIEELEDRVFVNCNTSIYRASSLSNCHHTSSVEE

SEQ ID NO: 219 - protein, 42 aa, Artificial Sequence
  chemically synthesized
TQVSPFKIPIEELEDRVFVNCNTSIYRASSLSNCKHTSSVEE

SEQ ID NO: 220 - protein, 42 aa, Artificial Sequence
  chemically synthesized
TQVSPFKIPIEELEDRVFVNCNTSIYRASSLSNCRGTSSVEE

SEQ ID NO: 221 - protein, 42 aa, Artificial Sequence
  chemically synthesized
TQVSPFKIPIEELEDRVFVNCNTSIYRASSLSNCRATSSVEE

SEQ ID NO: 222 - protein, 42 aa, Artificial Sequence
  chemically synthesized
TQVSPFKIPIEELEDRVFVNCNTSIYRASSLSNCRITSSVEE

SEQ ID NO: 223 - protein, 42 aa, Artificial Sequence
  chemically synthesized
TQVSPFKIPIEELEDRVFVNCNTSIYRASSLSNCRLTSSVEE

SEQ ID NO: 224 - protein, 42 aa, Artificial Sequence
  chemically synthesized
TQVSPFKIPIEELEDRVFVNCNTSIYRASSLSNCRMTSSVEE

SEQ ID NO: 225 - protein, 42 aa, Artificial Sequence
  chemically synthesized
TQVSPFKIPIEELEDRVFVNCNTSIYRASSLSNCRVTSSVEE

SEQ ID NO: 226 - protein, 42 aa, Artificial Sequence
  chemically synthesized
TQVSPFKIPIEELEDRVFVNCNTSIYRASSLSNCRHSSSVEE

SEQ ID NO: 227 - protein, 42 aa, Artificial Sequence
  chemically synthesized
TQVSPFKIPIEELEDRVFVNCNTSIYRASSLSNCRHYSSVEE

SEQ ID NO: 228 - protein, 42 aa, Artificial Sequence
  chemically synthesized
TQVSPFKIPIEELEDRVFVNCNTSIYRASSLSNCRHTTSVEE

SEQ ID NO: 229 - protein, 42 aa, Artificial Sequence
  chemically synthesized
TQVSPFKIPIEELEDRVFVNCNTSIYRASSLSNCRHTYSVEE

SEQ ID NO: 230 - protein, 42 aa, Artificial Sequence
  chemically synthesized
TQVSPFKIPIEELEDRVFVNCNTSIYRASSLSNCRHTSTVEE

SEQ ID NO: 231 - protein, 42 aa, Artificial Sequence
  chemically synthesized
TQVSPFKIPIEELEDRVFVNCNTSIYRASSLSNCRHTSYVEE

SEQ ID NO: 232 - protein, 42 aa, Artificial Sequence
  chemically synthesized
TQVSPFKIPIEELEDRVFVNCNTSIYRASSLSNCRHTSSIEE

SEQ ID NO: 233 - protein, 42 aa, Artificial Sequence
  chemically synthesized
TQVSPFKIPIEELEDRVFVNCNTSIYRASSLSNCRHTSSLEE

SEQ ID NO: 234 - protein, 42 aa, Artificial Sequence
  chemically synthesized
TQVSPFKIPIEELEDRVFVNCNTSIYRASSLSNCRHTSSFEE

SEQ ID NO: 235 - protein, 42 aa, Artificial Sequence
  chemically synthesized
TQVSPFKIPIEELEDRVFVNCNTSIYRASSLSNCRHTSSHEE

SEQ ID NO: 236 - protein, 42 aa, Artificial Sequence
  chemically synthesized
TQVSPFKIPIEELEDRVFVNCNTSIYRASSLSNCRHTSSMEE

SEQ ID NO: 237 - protein, 42 aa, Artificial Sequence
  chemically synthesized
TQVSPFKIPIEELEDRVFVNCNTSIYRASSLSNCRHTSSVDE

SEQ ID NO: 238 - protein, 42 aa, Artificial Sequence
  chemically synthesized
  misc_feature (41)..(41): Xaa can be a proteinogenic, non-proteinogenic or synthetic amino acid like ornithin or selenocystein
TQVSPFKIPIEELEDRVFVNCNTSIYRASSLSNCRHTSSVXE

SEQ ID NO: 239 - protein, 42 aa, Artificial Sequence
  chemically synthesized
TQVSPFKIPIEELEDRVFVNCNTSIYRASSLSNCRHTSSVED

SEQ ID NO: 240 - protein, 42 aa, Artificial Sequence
  chemically synthesized
  misc_feature (42)..(42): Xaa can be a proteinogenic, non-proteinogenic or synthetic amino acid like ornithin or selenocystein
TQVSPFKIPIEELEDRVFVNCNTSIYRASSLSNCRHTSSVEX

SEQ ID NO: 241 - protein, 42 aa, Artificial Sequence
  chemically synthesized
TQVSAFKIPIEELEDRVFVNCNTSIYRASSLSNCRHTSSVEE

SEQ ID NO: 242 - protein, 42 aa, Artificial Sequence
  chemically synthesized
TQVSGFKIPIEELEDRVFVNCNTSIYRASSLSNCRHTSSVEE

SEQ ID NO: 243 - protein, 42 aa, Artificial Sequence
  chemically synthesized
TQVSPFKIAIEELEDRVFVNCNTSIYRASSLSNCRHTSSVEE

SEQ ID NO: 244 - protein, 42 aa, Artificial Sequence
  chemically synthesized
TQVSPFKIGIEELEDRVFVNCNTSIYRASSLSNCRHTSSVEE

SEQ ID NO: 245 - protein, 42 aa, Artificial Sequence; identical to SEQ ID NO: 126
  chemically synthesized

SEQ ID NO: 246 - protein, 42 aa, Artificial Sequence
  chemically synthesized
YNVSPFKIPIEELEDRVFVNCNTSIYRASSLSNCRHTSSVEE

SEQ ID NO: 247 - protein, 42 aa, Artificial Sequence
  chemically synthesized
SNLSPFKIPIEELEDRVFVNCNTSIYRASSLSNCRHTSSVEE

SEQ ID NO: 248 - protein, 42 aa, Artificial Sequence
  chemically synthesized
SNISPFKIPIEELEDRVFVNCNTSIYRASSLSNCRHTSSVEE

SEQ ID NO: 249 - protein, 42 aa, Artificial Sequence
  chemically synthesized
SNPSPFKIPIEELEDRVFVNCNTSIYRASSLSNCRHTSSVEE

SEQ ID NO: 250 - protein, 42 aa, Artificial Sequence
  chemically synthesized
SNFSPFKIPIEELEDRVFVNCNTSIYRASSLSNCRHTSSVEE

SEQ ID NO: 251 - protein, 42 aa, Artificial Sequence
  chemically synthesized
SNVTPFKIPIEELEDRVFVNCNTSIYRASSLSNCRHTSSVEE

SEQ ID NO: 252 - protein, 42 aa, Artificial Sequence
  chemically synthesized
SNVYPFKIPIEELEDRVFVNCNTSIYRASSLSNCRHTSSVEE

SEQ ID NO: 253 - protein, 42 aa, Artificial Sequence
  chemically synthesized
SNVSPWKIPIEELEDRVFVNCNTSIYRASSLSNCRHTSSVEE

SEQ ID NO: 254 - protein, 42 aa, Artificial Sequence
  chemically synthesized
SNVSPYKIPIEELEDRVFVNCNTSIYRASSLSNCRHTSSVEE

SEQ ID NO: 255 - protein, 42 aa, Artificial Sequence
  chemically synthesized
SNVSPHKIPIEELEDRVFVNCNTSIYRASSLSNCRHTSSVEE

SEQ ID NO: 256 - protein, 42 aa, Artificial Sequence
  chemically synthesized
SNVSPFRIPIEELEDRVFVNCNTSIYRASSLSNCRHTSSVEE

SEQ ID NO: 257 - protein, 42 aa, Artificial Sequence
  chemically synthesized
SNVSPFHIPIEELEDRVFVNCNTSIYRASSLSNCRHTSSVEE

SEQ ID NO: 258 - protein, 42 aa, Artificial Sequence
  chemically synthesized
  misc_feature (7)..(7): Xaa can be a proteinogenic, non-proteinogenic or synthetic amino acid like ornithin or selenocystein
SNVSPFXIPIEELEDRVFVNCNTSIYRASSLSNCRHTSSVEE

SEQ ID NO: 259 - protein, 42 aa, Artificial Sequence
  chemically synthesized
SNVSPFKLPIEELEDRVFVNCNTSIYRASSLSNCRHTSSVEE

SEQ ID NO: 260 - protein, 42 aa, Artificial Sequence
  chemically synthesized
SNVSPFKHPIEELEDRVFVNCNTSIYRASSLSNCRHTSSVEE

SEQ ID NO: 261 - protein, 42 aa, Artificial Sequence
  chemically synthesized
SNVSPFKVPIEELEDRVFVNCNTSIYRASSLSNCRHTSSVEE

SEQ ID NO: 262 - protein, 42 aa, Artificial Sequence
  chemically synthesized
SNVSPFKFPIEELEDRVFVNCNTSIYRASSLSNCRHTSSVEE

SEQ ID NO: 263 - protein, 42 aa, Artificial Sequence
  chemically synthesized
SNVSPFKMPIEELEDRVFVNCNTSIYRASSLSNCRHTSSVEE

SEQ ID NO: 264 - protein, 42 aa, Artificial Sequence
  chemically synthesized
SNVSPFKIPLEELEDRVFVNCNTSIYRASSLSNCRHTSSVEE

SEQ ID NO: 265 - protein, 42 aa, Artificial Sequence
  chemically synthesized
SNVSPFKIPHEELEDRVFVNCNTSIYRASSLSNCRHTSSVEE

SEQ ID NO: 266 - protein, 42 aa, Artificial Sequence
  chemically synthesized
SNVSPFKIPVEELEDRVFVNCNTSIYRASSLSNCRHTSSVEE

SEQ ID NO: 267 - protein, 42 aa, Artificial Sequence
  chemically synthesized
SNVSPFKIPFEELEDRVFVNCNTSIYRASSLSNCRHTSSVEE

SEQ ID NO: 268 - protein, 42 aa, Artificial Sequence
  chemically synthesized
SNVSPFKIPMEELEDRVFVNCNTSIYRASSLSNCRHTSSVEE

SEQ ID NO: 269 - protein, 42 aa, Artificial Sequence
  chemically synthesized
SNVSPFKIPIDELEDRVFVNCNTSIYRASSLSNCRHTSSVEE

SEQ ID NO: 270 - protein, 42 aa, Artificial Sequence
  chemically synthesized
  misc_feature (11)..(11): Xaa can be a proteinogenic, non-proteinogenic or synthetic amino acid like ornithin or selenocystein
SNVSPFKIPIXELEDRVFVNCNTSIYRASSLSNCRHTSSVEE

SEQ ID NO: 271 - protein, 42 aa, Artificial Sequence
  chemically synthesized
SNVSPFKIPIEDLEDRVFVNCNTSIYRASSLSNCRHTSSVEE

SEQ ID NO: 272 - protein, 42 aa, Artificial Sequence
  chemically synthesized
  misc_feature (12)..(12): Xaa can be a proteinogenic, non-proteinogenic or synthetic amino acid like ornithin or selenocystein
SNVSPFKIPIEXLEDRVFVNCNTSIYRASSLSNCRHTSSVEE

SEQ ID NO: 273 - protein, 42 aa, Artificial Sequence
  chemically synthesized
SNVSPFKIPIEEVEDRVFVNCNTSIYRASSLSNCRHTSSVEE

SEQ ID NO: 274 - protein, 42 aa, Artificial Sequence
  chemically synthesized
SNVSPFKIPIEEIEDRVFVNCNTSIYRASSLSNCRHTSSVEE

SEQ ID NO: 275 - protein, 42 aa, Artificial Sequence
  chemically synthesized
SNVSPFKIPIEEFEDRVFVNCNTSIYRASSLSNCRHTSSVEE

SEQ ID NO: 276 - protein, 42 aa, Artificial Sequence
  chemically synthesized
SNVSPFKIPIEEHEDRVFVNCNTSIYRASSLSNCRHTSSVEE

SEQ ID NO: 277 - protein, 42 aa, Artificial Sequence
  chemically synthesized
SNVSPFKIPIEEMEDRVFVNCNTSIYRASSLSNCRHTSSVEE

SEQ ID NO: 278 - protein, 42 aa, Artificial Sequence
  chemically synthesized
SNVSPFKIPIEELDDRVFVNCNTSIYRASSLSNCRHTSSVEE

SEQ ID NO: 279 - protein, 42 aa, Artificial Sequence
  chemically synthesized
  misc_feature (14)..(14): Xaa can be a proteinogenic, non-proteinogenic or synthetic amino acid like ornithin or selenocystein
SNVSPFKIPIEELXDRVFVNCNTSIYRASSLSNCRHTSSVEE

SEQ ID NO: 280 - protein, 42 aa, Artificial Sequence
  chemically synthesized
  misc_feature (15)..(15): Xaa can be a proteinogenic, non-proteinogenic or synthetic amino acid like ornithin or selenocystein
SNVSPFKIPIEELEXRVFVNCNTSIYRASSLSNCRHTSSVEE

SEQ ID NO: 281 - protein, 42 aa, Artificial Sequence
  chemically synthesized
SNVSPFKIPIEELEERVFVNCNTSIYRASSLSNCRHTSSVEE

SEQ ID NO: 282 - protein, 42 aa, Artificial Sequence
  chemically synthesized
SNVSPFKIPIEELEDKVFVNCNTSIYRASSLSNCRHTSSVEE

SEQ ID NO: 283 - protein, 42 aa, Artificial Sequence
  chemically synthesized
SNVSPFKIPIEELEDHVFVNCNTSIYRASSLSNCRHTSSVEE

SEQ ID NO: 284 - protein, 42 aa, Artificial Sequence
  chemically synthesized
  misc_feature (16)..(16): Xaa can be a proteinogenic, non-proteinogenic or synthetic amino acid like ornithin or selenocystein
SNVSPFKIPIEELEDXVFVNCNTSIYRASSLSNCRHTSSVEE

SEQ ID NO: 285 - protein, 42 aa, Artificial Sequence
  chemically synthesized
SNVSPFKIPIEELEDRIFVNCNTSIYRASSLSNCRHTSSVEE

SEQ ID NO: 286 - protein, 42 aa, Artificial Sequence
  chemically synthesized
SNVSPFKIPIEELEDRLFVNCNTSIYRASSLSNCRHTSSVEE

SEQ ID NO: 287 - protein, 42 aa, Artificial Sequence
  chemically synthesized
SNVSPFKIPIEELEDRFFVNCNTSIYRASSLSNCRHTSSVEE

SEQ ID NO: 288 - protein, 42 aa, Artificial Sequence
  chemically synthesized
SNVSPFKIPIEELEDRHFVNCNTSIYRASSLSNCRHTSSVEE

SEQ ID NO: 289 - protein, 42 aa, Artificial Sequence
  chemically synthesized
SNVSPFKIPIEELEDRMFVNCNTSIYRASSLSNCRHTSSVEE

SEQ ID NO: 290 - protein, 42 aa, Artificial Sequence
  chemically synthesized
SNVSPFKIPIEELEDRVIVNCNTSIYRASSLSNCRHTSSVEE

SEQ ID NO: 291 - protein, 42 aa, Artificial Sequence
  chemically synthesized
SNVSPFKIPIEELEDRVLVNCNTSIYRASSLSNCRHTSSVEE

SEQ ID NO: 292 - protein, 42 aa, Artificial Sequence
  chemically synthesized
SNVSPFKIPIEELEDRVVVNCNTSIYRASSLSNCRHTSSVEE

SEQ ID NO: 293 - protein, 42 aa, Artificial Sequence
  chemically synthesized
SNVSPFKIPIEELEDRVHVNCNTSIYRASSLSNCRHTSSVEE

SEQ ID NO: 294 - protein, 42 aa, Artificial Sequence
  chemically synthesized
SNVSPFKIPIEELEDRVMVNCNTSIYRASSLSNCRHTSSVEE

SEQ ID NO: 295 - protein, 42 aa, Artificial Sequence
  chemically synthesized
SNVSPFKIPIEELEDRVFINCNTSIYRASSLSNCRHTSSVEE

SEQ ID NO: 296 - protein, 42 aa, Artificial Sequence
  chemically synthesized
SNVSPFKIPIEELEDRVFLNCNTSIYRASSLSNCRHTSSVEE

SEQ ID NO: 297 - protein, 42 aa, Artificial Sequence
  chemically synthesized
SNVSPFKIPIEELEDRVFFNCNTSIYRASSLSNCRHTSSVEE

SEQ ID NO: 298 - protein, 42 aa, Artificial Sequence
  chemically synthesized
SNVSPFKIPIEELEDRVFHNCNTSIYRASSLSNCRHTSSVEE

SEQ ID NO: 299 - protein, 42 aa, Artificial Sequence
  chemically synthesized
SNVSPFKIPIEELEDRVFMNCNTSIYRASSLSNCRHTSSVEE

SEQ ID NO: 300 - protein, 42 aa, Artificial Sequence
  chemically synthesized
SNVSPFKIPIEELEDRVFVQCNTSIYRASSLSNCRHTSSVEE

SEQ ID NO: 301 - protein, 42 aa, Artificial Sequence
  chemically synthesized
SNVSPFKIPIEELEDRVFVNSNTSIYRASSLSNCRHTSSVEE

SEQ ID NO: 302 - protein, 42 aa, Artificial Sequence
  chemically synthesized
SNVSPFKIPIEELEDRVFVNGNTSIYRASSLSNCRHTSSVEE

SEQ ID NO: 303 - protein, 42 aa, Artificial Sequence
  chemically synthesized
SNVSPFKIPIEELEDRVFVNANTSIYRASSLSNCRHTSSVEE

SEQ ID NO: 304 - protein, 42 aa, Artificial Sequence
  chemically synthesized
SNVSPFKIPIEELEDRVFVNCQTSIYRASSLSNCRHTSSVEE

SEQ ID NO: 305 - protein, 42 aa, Artificial Sequence
  chemically synthesized
SNVSPFKIPIEELEDRVFVNCNSSIYRASSLSNCRHTSSVEE

SEQ ID NO: 306 - protein, 42 aa, Artificial Sequence
  chemically synthesized
SNVSPFKIPIEELEDRVFVNCNYSIYRASSLSNCRHTSSVEE

SEQ ID NO: 307 - protein, 42 aa, Artificial Sequence
  chemically synthesized
SNVSPFKIPIEELEDRVFVNCNTTIYRASSLSNCRHTSSVEE

SEQ ID NO: 308 - protein, 42 aa, Artificial Sequence
  chemically synthesized
SNVSPFKIPIEELEDRVFVNCNTYIYRASSLSNCRHTSSVEE

SEQ ID NO: 309 - protein, 42 aa, Artificial Sequence
  chemically synthesized
SNVSPFKIPIEELEDRVFVNCNTSVYRASSLSNCRHTSSVEE

SEQ ID NO: 310 - protein, 42 aa, Artificial Sequence
  chemically synthesized
SNVSPFKIPIEELEDRVFVNCNTSLYRASSLSNCRHTSSVEE

SEQ ID NO: 311 - protein, 42 aa, Artificial Sequence
  chemically synthesized
SNVSPFKIPIEELEDRVFVNCNTSHYRASSLSNCRHTSSVEE

SEQ ID NO: 312 - protein, 42 aa, Artificial Sequence
  chemically synthesized
SNVSPFKIPIEELEDRVFVNCNTSFYRASSLSNCRHTSSVEE

SEQ ID NO: 313 - protein, 42 aa, Artificial Sequence
  chemically synthesized
SNVSPFKIPIEELEDRVFVNCNTSMYRASSLSNCRHTSSVEE

SEQ ID NO: 314 - protein, 42 aa, Artificial Sequence
  chemically synthesized
SNVSPFKIPIEELEDRVFVNCNTSIWRASSLSNCRHTSSVEE

SEQ ID NO: 315 - protein, 42 aa, Artificial Sequence
  chemically synthesized
SNVSPFKIPIEELEDRVFVNCNTSIFRASSLSNCRHTSSVEE

SEQ ID NO: 316 - protein, 42 aa, Artificial Sequence
  chemically synthesized
SNVSPFKIPIEELEDRVFVNCNTSISRASSLSNCRHTSSVEE

SEQ ID NO: 317 - protein, 42 aa, Artificial Sequence
  chemically synthesized
SNVSPFKIPIEELEDRVFVNCNTSITRASSLSNCRHTSSVEE

SEQ ID NO: 318 - protein, 42 aa, Artificial Sequence
  chemically synthesized
  misc_feature (27)..(27): Xaa can be a proteinogenic, non-proteinogenic or synthetic amino acid like ornithin or selenocystein
SNVSPFKIPIEELEDRVFVNCNTSIYXASSLSNCRHTSSVEE

SEQ ID NO: 319 - protein, 42 aa, Artificial Sequence
  chemically synthesized
SNVSPFKIPIEELEDRVFVNCNTSIYHASSLSNCRHTSSVEE

SEQ ID NO: 320 - protein, 42 aa, Artificial Sequence
  chemically synthesized
SNVSPFKIPIEELEDRVFVNCNTSIYKASSLSNCRHTSSVEE

SEQ ID NO: 321 - protein, 42 aa, Artificial Sequence
  chemically synthesized
SNVSPFKIPIEELEDRVFVNCNTSIYRGSSLSNCRHTSSVEE

SEQ ID NO: 322 - protein, 42 aa, Artificial Sequence
  chemically synthesized
SNVSPFKIPIEELEDRVFVNCNTSIYRATSLSNCRHTSSVEE

SEQ ID NO: 323 - protein, 42 aa, Artificial Sequence
  chemically synthesized
SNVSPFKIPIEELEDRVFVNCNTSIYRAYSLSNCRHTSSVEE

SEQ ID NO: 324 - protein, 42 aa, Artificial Sequence
  chemically synthesized
SNVSPFKIPIEELEDRVFVNCNTSIYRASTLSNCRHTSSVEE

SEQ ID NO: 325 - protein, 42 aa, Artificial Sequence
  chemically synthesized
SNVSPFKIPIEELEDRVFVNCNTSIYRASYLSNCRHTSSVEE

SEQ ID NO: 326 - protein, 42 aa, Artificial Sequence
  chemically synthesized
SNVSPFKIPIEELEDRVFVNCNTSIYRASSISNCRHTSSVEE

SEQ ID NO: 327 - protein, 42 aa, Artificial Sequence
  chemically synthesized
SNVSPFKIPIEELEDRVFVNCNTSIYRASSVSNCRHTSSVEE

SEQ ID NO: 328 - protein, 42 aa, Artificial Sequence
  chemically synthesized
SNVSPFKIPIEELEDRVFVNCNTSIYRASSFSNCRHTSSVEE

SEQ ID NO: 329 - protein, 42 aa, Artificial Sequence
  chemically synthesized
SNVSPFKIPIEELEDRVFVNCNTSIYRASSMSNCRHTSSVEE

SEQ ID NO: 330 - protein, 42 aa, Artificial Sequence
  chemically synthesized
SNVSPFKIPIEELEDRVFVNCNTSIYRASSHSNCRHTSSVEE

SEQ ID NO: 331 - protein, 42 aa, Artificial Sequence
  chemically synthesized
SNVSPFKIPIEELEDRVFVNCNTSIYRASSLTNCRHTSSVEE

SEQ ID NO: 332 - protein, 42 aa, Artificial Sequence
  chemically synthesized
SNVSPFKIPIEELEDRVFVNCNTSIYRASSLYNCRHTSSVEE

SEQ ID NO: 333 - protein, 42 aa, Artificial Sequence
  chemically synthesized
SNVSPFKIPIEELEDRVFVNCNTSIYRASSLSQCRHTSSVEE

SEQ ID NO: 334 - protein, 42 aa, Artificial Sequence
  chemically synthesized
SNVSPFKIPIEELEDRVFVNCNTSIYRASSLSNSRHTSSVEE

SEQ ID NO: 335 - protein, 42 aa, Artificial Sequence
  chemically synthesized
SNVSPFKIPIEELEDRVFVNCNTSIYRASSLSNGRHTSSVEE

SEQ ID NO: 336 - protein, 42 aa, Artificial Sequence
  chemically synthesized
SNVSPFKIPIEELEDRVFVNCNTSIYRASSLSNARHTSSVEE

SEQ ID NO: 337 - protein, 42 aa, Artificial Sequence
  chemically synthesized
  misc_feature (35)..(35): Xaa can be a proteinogenic, non-proteinogenic or synthetic amino acid like ornithin or selenocystein
SNVSPFKIPIEELEDRVFVNCNTSIYRASSLSNCXHTSSVEE

SEQ ID NO: 338 - protein, 42 aa, Artificial Sequence
  chemically synthesized
SNVSPFKIPIEELEDRVFVNCNTSIYRASSLSNCHHTSSVEE

SEQ ID NO: 339 - protein, 42 aa, Artificial Sequence
  chemically synthesized
SNVSPFKIPIEELEDRVFVNCNTSIYRASSLSNCKHTSSVEE

SEQ ID NO: 340 - protein, 42 aa, Artificial Sequence
  chemically synthesized
SNVSPFKIPIEELEDRVFVNCNTSIYRASSLSNCRGTSSVEE

SEQ ID NO: 341 - protein, 42 aa, Artificial Sequence
  chemically synthesized
SNVSPFKIPIEELEDRVFVNCNTSIYRASSLSNCRATSSVEE

SEQ ID NO: 342 - protein, 42 aa, Artificial Sequence
  chemically synthesized
SNVSPFKIPIEELEDRVFVNCNTSIYRASSLSNCRITSSVEE

SEQ ID NO: 343 - protein, 42 aa, Artificial Sequence
  chemically synthesized
SNVSPFKIPIEELEDRVFVNCNTSIYRASSLSNCRLTSSVEE

SEQ ID NO: 344 - protein, 42 aa, Artificial Sequence
  chemically synthesized
SNVSPFKIPIEELEDRVFVNCNTSIYRASSLSNCRMTSSVEE

SEQ ID NO: 345 - protein, 42 aa, Artificial Sequence
  chemically synthesized
SNVSPFKIPIEELEDRVFVNCNTSIYRASSLSNCRVTSSVEE

SEQ ID NO: 346 - protein, 42 aa, Artificial Sequence
  chemically synthesized
SNVSPFKIPIEELEDRVFVNCNTSIYRASSLSNCRHSSSVEE

SEQ ID NO: 347 - protein, 42 aa, Artificial Sequence
  chemically synthesized
SNVSPFKIPIEELEDRVFVNCNTSIYRASSLSNCRHYSSVEE

SEQ ID NO: 348 - protein, 42 aa, Artificial Sequence
  chemically synthesized
SNVSPFKIPIEELEDRVFVNCNTSIYRASSLSNCRHTTSVEE

SEQ ID NO: 349 - protein, 42 aa, Artificial Sequence
  chemically synthesized
SNVSPFKIPIEELEDRVFVNCNTSIYRASSLSNCRHTYSVEE

SEQ ID NO: 350 - protein, 42 aa, Artificial Sequence
  chemically synthesized
SNVSPFKIPIEELEDRVFVNCNTSIYRASSLSNCRHTSTVEE

SEQ ID NO: 351 - protein, 42 aa, Artificial Sequence
  chemically synthesized
SNVSPFKIPIEELEDRVFVNCNTSIYRASSLSNCRHTSYVEE

SEQ ID NO: 352 - protein, 42 aa, Artificial Sequence
  chemically synthesized
SNVSPFKIPIEELEDRVFVNCNTSIYRASSLSNCRHTSSIEE

SEQ ID NO: 353 - protein, 42 aa, Artificial Sequence
  chemically synthesized
SNVSPFKIPIEELEDRVFVNCNTSIYRASSLSNCRHTSSLEE

SEQ ID NO: 354 - protein, 42 aa, Artificial Sequence
  chemically synthesized
SNVSPFKIPIEELEDRVFVNCNTSIYRASSLSNCRHTSSFEE

SEQ ID NO: 355 - protein, 42 aa, Artificial Sequence
  chemically synthesized
SNVSPFKIPIEELEDRVFVNCNTSIYRASSLSNCRHTSSHEE

SEQ ID NO: 356 - protein, 42 aa, Artificial Sequence
  chemically synthesized
SNVSPFKIPIEELEDRVFVNCNTSIYRASSLSNCRHTSSMEE

SEQ ID NO: 357 - protein, 42 aa, Artificial Sequence
  chemically synthesized
SNVSPFKIPIEELEDRVFVNCNTSIYRASSLSNCRHTSSVDE

SEQ ID NO: 358 - protein, 42 aa, Artificial Sequence
  chemically synthesized
  misc_feature (41)..(41): Xaa can be a proteinogenic, non-proteinogenic or synthetic amino acid like ornithin or selenocystein
SNVSPFKIPIEELEDRVFVNCNTSIYRASSLSNCRHTSSVXE

SEQ ID NO: 359 - protein, 42 aa, Artificial Sequence
  chemically synthesized
SNVSPFKIPIEELEDRVFVNCNTSIYRASSLSNCRHTSSVED

SEQ ID NO: 360 - protein, 42 aa, Artificial Sequence
  chemically synthesized
  misc_feature (42)..(42): Xaa can be a proteinogenic, non-proteinogenic or synthetic amino acid like ornithin or selenocystein
SNVSPFKIPIEELEDRVFVNCNTSIYRASSLSNCRHTSSVEX

SEQ ID NO: 361 - protein, 42 aa, Artificial Sequence
  chemically synthesized
SNVSAFKIPIEELEDRVFVNCNTSIYRASSLSNCRHTSSVEE

SEQ ID NO: 362 - protein, 42 aa, Artificial Sequence
  chemically synthesized
SNVSGFKIPIEELEDRVFVNCNTSIYRASSLSNCRHTSSVEE

SEQ ID NO: 363 - protein, 42 aa, Artificial Sequence
  chemically synthesized
SNVSPFKIAIEELEDRVFVNCNTSIYRASSLSNCRHTSSVEE

SEQ ID NO: 364 - protein, 42 aa, Artificial Sequence
  chemically synthesized
SNVSPFKIGIEELEDRVFVNCNTSIYRASSLSNCRHTSSVEE

SEQ ID NO: 365 - protein, 42 aa, Artificial Sequence; identical to SEQ ID NO: 127
  chemically synthesized

SEQ ID NO: 366 - protein, 42 aa, Artificial Sequence
  chemically synthesized
YQLSPFKIPIEELEDRVFVNCNTSIYRASSLSNCRHTSSVEE

SEQ ID NO: 367 - protein, 42 aa, Artificial Sequence; identical to SEQ ID NO: 247
  chemically synthesized

SEQ ID NO: 368 - protein, 42 aa, Artificial Sequence; identical to SEQ ID NO: 8
  chemically synthesized

SEQ ID NO: 369 - protein, 42 aa, Artificial Sequence
  chemically synthesized
SQLTPFKIPIEELEDRVFVNCNTSIYRASSLSNCRHTSSVEE

SEQ ID NO: 370 - protein, 42 aa, Artificial Sequence
  chemically synthesized
SQLYPFKIPIEELEDRVFVNCNTSIYRASSLSNCRHTSSVEE

SEQ ID NO: 371 - protein, 42 aa, Artificial Sequence
  chemically synthesized
SQLSPWKIPIEELEDRVFVNCNTSIYRASSLSNCRHTSSVEE

SEQ ID NO: 372 - protein, 42 aa, Artificial Sequence
  chemically synthesized
SQLSPYKIPIEELEDRVFVNCNTSIYRASSLSNCRHTSSVEE

SEQ ID NO: 373 - protein, 42 aa, Artificial Sequence
  chemically synthesized
SQLSPHKIPIEELEDRVFVNCNTSIYRASSLSNCRHTSSVEE

SEQ ID NO: 374 - protein, 42 aa, Artificial Sequence
  chemically synthesized
SQLSPFRIPIEELEDRVFVNCNTSIYRASSLSNCRHTSSVEE

SEQ ID NO: 375 - protein, 42 aa, Artificial Sequence
  chemically synthesized
SQLSPFHIPIEELEDRVFVNCNTSIYRASSLSNCRHTSSVEE

SEQ ID NO: 376 - protein, 42 aa, Artificial Sequence
  chemically synthesized
  misc_feature (7)..(7): Xaa can be a proteinogenic, non-proteinogenic or synthetic amino acid like ornithin or selenocystein
SQLSPFXIPIEELEDRVFVNCNTSIYRASSLSNCRHTSSVEE

SEQ ID NO: 377 - protein, 42 aa, Artificial Sequence
  chemically synthesized
SQLSPFKLPIEELEDRVFVNCNTSIYRASSLSNCRHTSSVEE

SEQ ID NO: 378 - protein, 42 aa, Artificial Sequence
  chemically synthesized
SQLSPFKHPIEELEDRVFVNCNTSIYRASSLSNCRHTSSVEE

SEQ ID NO: 379 - protein, 42 aa, Artificial Sequence
  chemically synthesized
SQLSPFKVPIEELEDRVFVNCNTSIYRASSLSNCRHTSSVEE

SEQ ID NO: 380 - protein, 42 aa, Artificial Sequence
  chemically synthesized
SQLSPFKFPIEELEDRVFVNCNTSIYRASSLSNCRHTSSVEE

SEQ ID NO: 381 - protein, 42 aa, Artificial Sequence
  chemically synthesized
SQLSPFKMPIEELEDRVFVNCNTSIYRASSLSNCRHTSSVEE

SEQ ID NO: 382 - protein, 42 aa, Artificial Sequence
  chemically synthesized
SQLSPFKIPLEELEDRVFVNCNTSIYRASSLSNCRHTSSVEE

SEQ ID NO: 383 - protein, 42 aa, Artificial Sequence
  chemically synthesized
SQLSPFKIPHEELEDRVFVNCNTSIYRASSLSNCRHTSSVEE

SEQ ID NO: 384 - protein, 42 aa, Artificial Sequence
  chemically synthesized
SQLSPFKIPVEELEDRVFVNCNTSIYRASSLSNCRHTSSVEE

SEQ ID NO: 385 - protein, 42 aa, Artificial Sequence
  chemically synthesized
SQLSPFKIPFEELEDRVFVNCNTSIYRASSLSNCRHTSSVEE

SEQ ID NO: 386 - protein, 42 aa, Artificial Sequence
  chemically synthesized
SQLSPFKIPMEELEDRVFVNCNTSIYRASSLSNCRHTSSVEE

SEQ ID NO: 387 - protein, 42 aa, Artificial Sequence
  chemically synthesized
SQLSPFKIPIDELEDRVFVNCNTSIYRASSLSNCRHTSSVEE

SEQ ID NO: 388 - protein, 42 aa, Artificial Sequence
  chemically synthesized
  misc_feature (11)..(11): Xaa can be a proteinogenic, non-proteinogenic or synthetic amino acid like ornithin or selenocystein
SQLSPFKIPIXELEDRVFVNCNTSIYRASSLSNCRHTSSVEE

SEQ ID NO: 389 - protein, 42 aa, Artificial Sequence
  chemically synthesized
SQLSPFKIPIEDLEDRVFVNCNTSIYRASSLSNCRHTSSVEE

SEQ ID NO: 390 - protein, 42 aa, Artificial Sequence
  chemically synthesized
  misc_feature (12)..(12): Xaa can be a proteinogenic, non-proteinogenic or synthetic amino acid like ornithin or selenocystein
SQLSPFKIPIEXLEDRVFVNCNTSIYRASSLSNCRHTSSVEE

SEQ ID NO: 391 - protein, 42 aa, Artificial Sequence
  chemically synthesized
SQLSPFKIPIEEVEDRVFVNCNTSIYRASSLSNCRHTSSVEE

SEQ ID NO: 392 - protein, 42 aa, Artificial Sequence
  chemically synthesized
SQLSPFKIPIEEIEDRVFVNCNTSIYRASSLSNCRHTSSVEE

SEQ ID NO: 393 - protein, 42 aa, Artificial Sequence
  chemically synthesized
SQLSPFKIPIEEFEDRVFVNCNTSIYRASSLSNCRHTSSVEE

SEQ ID NO: 394 - protein, 42 aa, Artificial Sequence
  chemically synthesized
SQLSPFKIPIEEHEDRVFVNCNTSIYRASSLSNCRHTSSVEE

SEQ ID NO: 395 - protein, 42 aa, Artificial Sequence
  chemically synthesized
SQLSPFKIPIEEMEDRVFVNCNTSIYRASSLSNCRHTSSVEE

SEQ ID NO: 396 - protein, 42 aa, Artificial Sequence
  chemically synthesized
SQLSPFKIPIEELDDRVFVNCNTSIYRASSLSNCRHTSSVEE

SEQ ID NO: 397 - protein, 42 aa, Artificial Sequence
  chemically synthesized
  misc_feature (14)..(14): Xaa can be a proteinogenic, non-proteinogenic or synthetic amino acid like ornithin or selenocystein
SQLSPFKIPIEELXDRVFVNCNTSIYRASSLSNCRHTSSVEE

SEQ ID NO: 398 - protein, 42 aa, Artificial Sequence
  chemically synthesized
  misc_feature (15)..(15): Xaa can be a proteinogenic, non-proteinogenic or synthetic amino acid like ornithin or selenocystein
SQLSPFKIPIEELEXRVFVNCNTSIYRASSLSNCRHTSSVEE

SEQ ID NO: 399 - protein, 42 aa, Artificial Sequence
  chemically synthesized
SQLSPFKIPIEELEERVFVNCNTSIYRASSLSNCRHTSSVEE

SEQ ID NO: 400 - protein, 42 aa, Artificial Sequence
  chemically synthesized
SQLSPFKIPIEELEDKVFVNCNTSIYRASSLSNCRHTSSVEE

SEQ ID NO: 401 - protein, 42 aa, Artificial Sequence
  chemically synthesized
SQLSPFKIPIEELEDHVFVNCNTSIYRASSLSNCRHTSSVEE

SEQ ID NO: 402 - protein, 42 aa, Artificial Sequence
  chemically synthesized
  misc_feature (16)..(16): Xaa can be a proteinogenic, non-proteinogenic or synthetic amino acid like ornithin or selenocystein
SQLSPFKIPIEELEDXVFVNCNTSIYRASSLSNCRHTSSVEE

SEQ ID NO: 403 - protein, 42 aa, Artificial Sequence
  chemically synthesized
SQLSPFKIPIEELEDRIFVNCNTSIYRASSLSNCRHTSSVEE

SEQ ID NO: 404 - protein, 42 aa, Artificial Sequence
  chemically synthesized
SQLSPFKIPIEELEDRLFVNCNTSIYRASSLSNCRHTSSVEE

SEQ ID NO: 405 - protein, 42 aa, Artificial Sequence
  chemically synthesized
SQLSPFKIPIEELEDRFFVNCNTSIYRASSLSNCRHTSSVEE

SEQ ID NO: 406 - protein, 42 aa, Artificial Sequence
  chemically synthesized
SQLSPFKIPIEELEDRHFVNCNTSIYRASSLSNCRHTSSVEE

SEQ ID NO: 407 - protein, 42 aa, Artificial Sequence
  chemically synthesized
SQLSPFKIPIEELEDRMFVNCNTSIYRASSLSNCRHTSSVEE

SEQ ID NO: 408 - protein, 42 aa, Artificial Sequence
  chemically synthesized
SQLSPFKIPIEELEDRVIVNCNTSIYRASSLSNCRHTSSVEE

SEQ ID NO: 409 - protein, 42 aa, Artificial Sequence
  chemically synthesized
SQLSPFKIPIEELEDRVLVNCNTSIYRASSLSNCRHTSSVEE

SEQ ID NO: 410 - protein, 42 aa, Artificial Sequence
  chemically synthesized
SQLSPFKIPIEELEDRVVVNCNTSIYRASSLSNCRHTSSVEE

SEQ ID NO: 411 - protein, 42 aa, Artificial Sequence
  chemically synthesized
SQLSPFKIPIEELEDRVHVNCNTSIYRASSLSNCRHTSSVEE

SEQ ID NO: 412 - protein, 42 aa, Artificial Sequence
  chemically synthesized
SQLSPFKIPIEELEDRVMVNCNTSIYRASSLSNCRHTSSVEE

SEQ ID NO: 413 - protein, 42 aa, Artificial Sequence
  chemically synthesized
SQLSPFKIPIEELEDRVFINCNTSIYRASSLSNCRHTSSVEE

SEQ ID NO: 414 - protein, 42 aa, Artificial Sequence
  chemically synthesized
SQLSPFKIPIEELEDRVFLNCNTSIYRASSLSNCRHTSSVEE

SEQ ID NO: 415 - protein, 42 aa, Artificial Sequence
  chemically synthesized
SQLSPFKIPIEELEDRVFFNCNTSIYRASSLSNCRHTSSVEE

SEQ ID NO: 416 - protein, 42 aa, Artificial Sequence
  chemically synthesized
SQLSPFKIPIEELEDRVFHNCNTSIYRASSLSNCRHTSSVEE

SEQ ID NO: 417 - protein, 42 aa, Artificial Sequence
  chemically synthesized
SQLSPFKIPIEELEDRVFMNCNTSIYRASSLSNCRHTSSVEE

SEQ ID NO: 418 - protein, 42 aa, Artificial Sequence
  chemically synthesized
SQLSPFKIPIEELEDRVFVQCNTSIYRASSLSNCRHTSSVEE

SEQ ID NO: 419 - protein, 42 aa, Artificial Sequence
  chemically synthesized
SQLSPFKIPIEELEDRVFVNSNTSIYRASSLSNCRHTSSVEE

SEQ ID NO: 420 - protein, 42 aa, Artificial Sequence
  chemically synthesized
SQLSPFKIPIEELEDRVFVNGNTSIYRASSLSNCRHTSSVEE

SEQ ID NO: 421 - protein, 42 aa, Artificial Sequence
  chemically synthesized
SQLSPFKIPIEELEDRVFVNANTSIYRASSLSNCRHTSSVEE

SEQ ID NO: 422 - protein, 42 aa, Artificial Sequence
  chemically synthesized
SQLSPFKIPIEELEDRVFVNCQTSIYRASSLSNCRHTSSVEE

SEQ ID NO: 423 - protein, 42 aa, Artificial Sequence
  chemically synthesized
SQLSPFKIPIEELEDRVFVNCNSSIYRASSLSNCRHTSSVEE

SEQ ID NO: 424 - protein, 42 aa, Artificial Sequence
  chemically synthesized
SQLSPFKIPIEELEDRVFVNCNYSIYRASSLSNCRHTSSVEE

SEQ ID NO: 425 - protein, 42 aa, Artificial Sequence
  chemically synthesized
SQLSPFKIPIEELEDRVFVNCNTTIYRASSLSNCRHTSSVEE

SEQ ID NO: 426 - protein, 42 aa, Artificial Sequence
  chemically synthesized
SQLSPFKIPIEELEDRVFVNCNTYIYRASSLSNCRHTSSVEE

SEQ ID NO: 427 - protein, 42 aa, Artificial Sequence
  chemically synthesized
SQLSPFKIPIEELEDRVFVNCNTSVYRASSLSNCRHTSSVEE

SEQ ID NO: 428 - protein, 42 aa, Artificial Sequence
  chemically synthesized
SQLSPFKIPIEELEDRVFVNCNTSLYRASSLSNCRHTSSVEE

SEQ ID NO: 429 - protein, 42 aa, Artificial Sequence
  chemically synthesized
SQLSPFKIPIEELEDRVFVNCNTSHYRASSLSNCRHTSSVEE

SEQ ID NO: 430 - protein, 42 aa, Artificial Sequence
  chemically synthesized
SQLSPFKIPIEELEDRVFVNCNTSFYRASSLSNCRHTSSVEE

SEQ ID NO: 431 - protein, 42 aa, Artificial Sequence
  chemically synthesized
SQLSPFKIPIEELEDRVFVNCNTSMYRASSLSNCRHTSSVEE

SEQ ID NO: 432 - protein, 42 aa, Artificial Sequence
  chemically synthesized
SQLSPFKIPIEELEDRVFVNCNTSIWRASSLSNCRHTSSVEE

SEQ ID NO: 433 - protein, 42 aa, Artificial Sequence
  chemically synthesized
SQLSPFKIPIEELEDRVFVNCNTSIFRASSLSNCRHTSSVEE

SEQ ID NO: 434 - protein, 42 aa, Artificial Sequence
  chemically synthesized
SQLSPFKIPIEELEDRVFVNCNTSISRASSLSNCRHTSSVEE

SEQ ID NO: 435 - protein, 42 aa, Artificial Sequence
  chemically synthesized
SQLSPFKIPIEELEDRVFVNCNTSITRASSLSNCRHTSSVEE

SEQ ID NO: 436 - protein, 42 aa, Artificial Sequence
  chemically synthesized
  misc_feature (27)..(27): Xaa can be a proteinogenic, non-proteinogenic or synthetic amino acid like ornithin or selenocystein
SQLSPFKIPIEELEDRVFVNCNTSIYXASSLSNCRHTSSVEE

SEQ ID NO: 437 - protein, 42 aa, Artificial Sequence
  chemically synthesized
SQLSPFKIPIEELEDRVFVNCNTSIYHASSLSNCRHTSSVEE

SEQ ID NO: 438 - protein, 42 aa, Artificial Sequence
  chemically synthesized
SQLSPFKIPIEELEDRVFVNCNTSIYKASSLSNCRHTSSVEE

SEQ ID NO: 439 - protein, 42 aa, Artificial Sequence
  chemically synthesized
SQLSPFKIPIEELEDRVFVNCNTSIYRGSSLSNCRHTSSVEE

SEQ ID NO: 440 - protein, 42 aa, Artificial Sequence
  chemically synthesized
SQLSPFKIPIEELEDRVFVNCNTSIYRATSLSNCRHTSSVEE

SEQ ID NO: 441 - protein, 42 aa, Artificial Sequence
  chemically synthesized
SQLSPFKIPIEELEDRVFVNCNTSIYRAYSLSNCRHTSSVEE

SEQ ID NO: 442 - protein, 42 aa, Artificial Sequence
  chemically synthesized
SQLSPFKIPIEELEDRVFVNCNTSIYRASTLSNCRHTSSVEE

SEQ ID NO: 443 - protein, 42 aa, Artificial Sequence
  chemically synthesized
SQLSPFKIPIEELEDRVFVNCNTSIYRASYLSNCRHTSSVEE

SEQ ID NO: 444 - protein, 42 aa, Artificial Sequence
  chemically synthesized
SQLSPFKIPIEELEDRVFVNCNTSIYRASSISNCRHTSSVEE

SEQ ID NO: 445 - protein, 42 aa, Artificial Sequence
  chemically synthesized
SQLSPFKIPIEELEDRVFVNCNTSIYRASSVSNCRHTSSVEE

SEQ ID NO: 446 - protein, 42 aa, Artificial Sequence
  chemically synthesized
SQLSPFKIPIEELEDRVFVNCNTSIYRASSFSNCRHTSSVEE

SEQ ID NO: 447 - protein, 42 aa, Artificial Sequence
  chemically synthesized
SQLSPFKIPIEELEDRVFVNCNTSIYRASSMSNCRHTSSVEE

SEQ ID NO: 448 - protein, 42 aa, Artificial Sequence
  chemically synthesized
SQLSPFKIPIEELEDRVFVNCNTSIYRASSHSNCRHTSSVEE

SEQ ID NO: 449 - protein, 42 aa, Artificial Sequence
  chemically synthesized
SQLSPFKIPIEELEDRVFVNCNTSIYRASSLTNCRHTSSVEE

SEQ ID NO: 450 - protein, 42 aa, Artificial Sequence
  chemically synthesized
SQLSPFKIPIEELEDRVFVNCNTSIYRASSLYNCRHTSSVEE

SEQ ID NO: 451 - protein, 42 aa, Artificial Sequence
  chemically synthesized
SQLSPFKIPIEELEDRVFVNCNTSIYRASSLSQCRHTSSVEE

SEQ ID NO: 452 - protein, 42 aa, Artificial Sequence
  chemically synthesized
SQLSPFKIPIEELEDRVFVNCNTSIYRASSLSNSRHTSSVEE

SEQ ID NO: 453 - protein, 42 aa, Artificial Sequence
  chemically synthesized
SQLSPFKIPIEELEDRVFVNCNTSIYRASSLSNGRHTSSVEE

SEQ ID NO: 454 - protein, 42 aa, Artificial Sequence
  chemically synthesized
SQLSPFKIPIEELEDRVFVNCNTSIYRASSLSNARHTSSVEE

SEQ ID NO: 455 - protein, 42 aa, Artificial Sequence
  chemically synthesized
  misc_feature (35)..(35): Xaa can be a proteinogenic, non-proteinogenic or synthetic amino acid like ornithin or selenocystein
SQLSPFKIPIEELEDRVFVNCNTSIYRASSLSNCXHTSSVEE

SEQ ID NO: 456 - protein, 42 aa, Artificial Sequence
  chemically synthesized
SQLSPFKIPIEELEDRVFVNCNTSIYRASSLSNCHHTSSVEE

SEQ ID NO: 457 - protein, 42 aa, Artificial Sequence
  chemically synthesized
SQLSPFKIPIEELEDRVFVNCNTSIYRASSLSNCKHTSSVEE

SEQ ID NO: 458 - protein, 42 aa, Artificial Sequence
  chemically synthesized
SQLSPFKIPIEELEDRVFVNCNTSIYRASSLSNCRGTSSVEE

SEQ ID NO: 459 - protein, 42 aa, Artificial Sequence
  chemically synthesized
SQLSPFKIPIEELEDRVFVNCNTSIYRASSLSNCRATSSVEE

SEQ ID NO: 460 - protein, 42 aa, Artificial Sequence
  chemically synthesized
SQLSPFKIPIEELEDRVFVNCNTSIYRASSLSNCRITSSVEE

SEQ ID NO: 461 - protein, 42 aa, Artificial Sequence
  chemically synthesized
SQLSPFKIPIEELEDRVFVNCNTSIYRASSLSNCRLTSSVEE

SEQ ID NO: 462 - protein, 42 aa, Artificial Sequence
  chemically synthesized
SQLSPFKIPIEELEDRVFVNCNTSIYRASSLSNCRMTSSVEE

SEQ ID NO: 463 - protein, 42 aa, Artificial Sequence
  chemically synthesized
SQLSPFKIPIEELEDRVFVNCNTSIYRASSLSNCRVTSSVEE

SEQ ID NO: 464 - protein, 42 aa, Artificial Sequence
  chemically synthesized
SQLSPFKIPIEELEDRVFVNCNTSIYRASSLSNCRHSSSVEE

SEQ ID NO: 465 - protein, 42 aa, Artificial Sequence
  chemically synthesized
SQLSPFKIPIEELEDRVFVNCNTSIYRASSLSNCRHYSSVEE

SEQ ID NO: 466 - protein, 42 aa, Artificial Sequence
  chemically synthesized
SQLSPFKIPIEELEDRVFVNCNTSIYRASSLSNCRHTTSVEE

SEQ ID NO: 467 - protein, 42 aa, Artificial Sequence
  chemically synthesized
SQLSPFKIPIEELEDRVFVNCNTSIYRASSLSNCRHTYSVEE

SEQ ID NO: 468 - protein, 42 aa, Artificial Sequence
  chemically synthesized
SQLSPFKIPIEELEDRVFVNCNTSIYRASSLSNCRHTSTVEE

SEQ ID NO: 469 - protein, 42 aa, Artificial Sequence
  chemically synthesized
SQLSPFKIPIEELEDRVFVNCNTSIYRASSLSNCRHTSYVEE

SEQ ID NO: 470 - protein, 42 aa, Artificial Sequence
  chemically synthesized
SQLSPFKIPIEELEDRVFVNCNTSIYRASSLSNCRHTSSIEE

SEQ ID NO: 471 - protein, 42 aa, Artificial Sequence
  chemically synthesized
SQLSPFKIPIEELEDRVFVNCNTSIYRASSLSNCRHTSSLEE

SEQ ID NO: 472 - protein, 42 aa, Artificial Sequence
  chemically synthesized
SQLSPFKIPIEELEDRVFVNCNTSIYRASSLSNCRHTSSFEE

SEQ ID NO: 473 - protein, 42 aa, Artificial Sequence
  chemically synthesized
SQLSPFKIPIEELEDRVFVNCNTSIYRASSLSNCRHTSSHEE

SEQ ID NO: 474 - protein, 42 aa, Artificial Sequence
  chemically synthesized
SQLSPFKIPIEELEDRVFVNCNTSIYRASSLSNCRHTSSMEE

SEQ ID NO: 475 - protein, 42 aa, Artificial Sequence
  chemically synthesized
SQLSPFKIPIEELEDRVFVNCNTSIYRASSLSNCRHTSSVDE

SEQ ID NO: 476 - protein, 42 aa, Artificial Sequence
  chemically synthesized
  misc_feature (41)..(41): Xaa can be a proteinogenic, non-proteinogenic or synthetic amino acid like ornithin or selenocystein
SQLSPFKIPIEELEDRVFVNCNTSIYRASSLSNCRHTSSVXE

SEQ ID NO: 477 - protein, 42 aa, Artificial Sequence
  chemically synthesized
SQLSPFKIPIEELEDRVFVNCNTSIYRASSLSNCRHTSSVED

SEQ ID NO: 478 - protein, 42 aa, Artificial Sequence
  chemically synthesized
  misc_feature (42)..(42): Xaa can be a proteinogenic, non-proteinogenic or synthetic amino acid like ornithin or selenocystein
SQLSPFKIPIEELEDRVFVNCNTSIYRASSLSNCRHTSSVEX

SEQ ID NO: 479 - protein, 42 aa, Artificial Sequence
  chemically synthesized
SQLSAFKIPIEELEDRVFVNCNTSIYRASSLSNCRHTSSVEE

SEQ ID NO: 480 - protein, 42 aa, Artificial Sequence
  chemically synthesized
SQLSGFKIPIEELEDRVFVNCNTSIYRASSLSNCRHTSSVEE

SEQ ID NO: 481 - protein, 42 aa, Artificial Sequence
  chemically synthesized
SQLSPFKIAIEELEDRVFVNCNTSIYRASSLSNCRHTSSVEE

SEQ ID NO: 482 - protein, 42 aa, Artificial Sequence
  chemically synthesized
SQLSPFKIGIEELEDRVFVNCNTSIYRASSLSNCRHTSSVEE

SEQ ID NO: 483 - protein, 42 aa, Artificial Sequence; identical to SEQ ID NO: 131
  chemically synthesized

SEQ ID NO: 484 - protein, 42 aa, Artificial Sequence
  chemically synthesized
YQVTPFKIPIEELEDRVFVNCNTSIYRASSLSNCRHTSSVEE

SEQ ID NO: 485 - protein, 42 aa, Artificial Sequence; identical to SEQ ID NO: 251
  chemically synthesized

SEQ ID NO: 486 - protein, 42 aa, Artificial Sequence; identical to SEQ ID NO: 369
  chemically synthesized

SEQ ID NO: 487 - protein, 42 aa, Artificial Sequence
  chemically synthesized
SQITPFKIPIEELEDRVFVNCNTSIYRASSLSNCRHTSSVEE

SEQ ID NO: 488 - protein, 42 aa, Artificial Sequence
  chemically synthesized
SQPTPFKIPIEELEDRVFVNCNTSIYRASSLSNCRHTSSVEE

SEQ ID NO: 489 - protein, 42 aa, Artificial Sequence
  chemically synthesized
SQFTPFKIPIEELEDRVFVNCNTSIYRASSLSNCRHTSSVEE

SEQ ID NO: 490 - protein, 42 aa, Artificial Sequence
  chemically synthesized
SQVTPWKIPIEELEDRVFVNCNTSIYRASSLSNCRHTSSVEE

SEQ ID NO: 491 - protein, 42 aa, Artificial Sequence
  chemically synthesized
SQVTPYKIPIEELEDRVFVNCNTSIYRASSLSNCRHTSSVEE

SEQ ID NO: 492 - protein, 42 aa, Artificial Sequence
  chemically synthesized
SQVTPHKIPIEELEDRVFVNCNTSIYRASSLSNCRHTSSVEE

SEQ ID NO: 493 - protein, 42 aa, Artificial Sequence
  chemically synthesized
SQVTPFRIPIEELEDRVFVNCNTSIYRASSLSNCRHTSSVEE

SEQ ID NO: 494 - protein, 42 aa, Artificial Sequence
  chemically synthesized
SQVTPFHIPIEELEDRVFVNCNTSIYRASSLSNCRHTSSVEE

SEQ ID NO: 495 - protein, 42 aa, Artificial Sequence
  chemically synthesized
  misc_feature (7)..(7): Xaa can be a proteinogenic, non-proteinogenic or synthetic amino acid like ornithin or selenocystein
SQVTPFXIPIEELEDRVFVNCNTSIYRASSLSNCRHTSSVEE

SEQ ID NO: 496 - protein, 42 aa, Artificial Sequence
  chemically synthesized
SQVTPFKLPIEELEDRVFVNCNTSIYRASSLSNCRHTSSVEE

SEQ ID NO: 497 - protein, 42 aa, Artificial Sequence
  chemically synthesized
SQVTPFKHPIEELEDRVFVNCNTSIYRASSLSNCRHTSSVEE

SEQ ID NO: 498 - protein, 42 aa, Artificial Sequence
  chemically synthesized
SQVTPFKVPIEELEDRVFVNCNTSIYRASSLSNCRHTSSVEE

SEQ ID NO: 499 - protein, 42 aa, Artificial Sequence
  chemically synthesized
SQVTPFKFPIEELEDRVFVNCNTSIYRASSLSNCRHTSSVEE

SEQ ID NO: 500 - protein, 42 aa, Artificial Sequence
  chemically synthesized
SQVTPFKMPIEELEDRVFVNCNTSIYRASSLSNCRHTSSVEE

SEQ ID NO: 501 - protein, 42 aa, Artificial Sequence
  chemically synthesized
SQVTPFKIPLEELEDRVFVNCNTSIYRASSLSNCRHTSSVEE

SEQ ID NO: 502 - protein, 42 aa, Artificial Sequence
  chemically synthesized
SQVTPFKIPHEELEDRVFVNCNTSIYRASSLSNCRHTSSVEE

SEQ ID NO: 503 - protein, 42 aa, Artificial Sequence
  chemically synthesized
SQVTPFKIPVEELEDRVFVNCNTSIYRASSLSNCRHTSSVEE

SEQ ID NO: 504 - protein, 42 aa, Artificial Sequence
  chemically synthesized
SQVTPFKIPFEELEDRVFVNCNTSIYRASSLSNCRHTSSVEE

SEQ ID NO: 505 - protein, 42 aa, Artificial Sequence
  chemically synthesized
SQVTPFKIPMEELEDRVFVNCNTSIYRASSLSNCRHTSSVEE

SEQ ID NO: 506 - protein, 42 aa, Artificial Sequence
  chemically synthesized
SQVTPFKIPIDELEDRVFVNCNTSIYRASSLSNCRHTSSVEE

SEQ ID NO: 507 - protein, 42 aa, Artificial Sequence
  chemically synthesized
  misc_feature (11)..(11): Xaa can be a proteinogenic, non-proteinogenic or synthetic amino acid like ornithin or selenocystein
SQVTPFKIPIXELEDRVFVNCNTSIYRASSLSNCRHTSSVEE

SEQ ID NO: 508 - protein, 42 aa, Artificial Sequence
  chemically synthesized
SQVTPFKIPIEDLEDRVFVNCNTSIYRASSLSNCRHTSSVEE

SEQ ID NO: 509 - protein, 42 aa, Artificial Sequence
  chemically synthesized
  misc_feature (12)..(12): Xaa can be a proteinogenic, non-proteinogenic or synthetic amino acid like ornithin or selenocystein
SQVTPFKIPIEXLEDRVFVNCNTSIYRASSLSNCRHTSSVEE

SEQ ID NO: 510 - protein, 42 aa, Artificial Sequence
  chemically synthesized
SQVTPFKIPIEEVEDRVFVNCNTSIYRASSLSNCRHTSSVEE

SEQ ID NO: 511 - protein, 42 aa, Artificial Sequence
  chemically synthesized
SQVTPFKIPIEEIEDRVFVNCNTSIYRASSLSNCRHTSSVEE

SEQ ID NO: 512 - protein, 42 aa, Artificial Sequence
  chemically synthesized
SQVTPFKIPIEEFEDRVFVNCNTSIYRASSLSNCRHTSSVEE

SEQ ID NO: 513 - protein, 42 aa, Artificial Sequence
  chemically synthesized
SQVTPFKIPIEEHEDRVFVNCNTSIYRASSLSNCRHTSSVEE

SEQ ID NO: 514 - protein, 42 aa, Artificial Sequence
  chemically synthesized
SQVTPFKIPIEEMEDRVFVNCNTSIYRASSLSNCRHTSSVEE

SEQ ID NO: 515 - protein, 42 aa, Artificial Sequence
  chemically synthesized
SQVTPFKIPIEELDDRVFVNCNTSIYRASSLSNCRHTSSVEE

SEQ ID NO: 516 - protein, 42 aa, Artificial Sequence
  chemically synthesized
  misc_feature (14)..(14): Xaa can be a proteinogenic, non-proteinogenic or synthetic amino acid like ornithin or selenocystein
SQVTPFKIPIEELXDRVFVNCNTSIYRASSLSNCRHTSSVEE

SEQ ID NO: 517 - protein, 42 aa, Artificial Sequence
  chemically synthesized
  misc_feature (15)..(15): Xaa can be a proteinogenic, non-proteinogenic or synthetic amino acid like ornithin or selenocystein
SQVTPFKIPIEELEXRVFVNCNTSIYRASSLSNCRHTSSVEE

SEQ ID NO: 518 - protein, 42 aa, Artificial Sequence
  chemically synthesized
SQVTPFKIPIEELEERVFVNCNTSIYRASSLSNCRHTSSVEE

SEQ ID NO: 519 - protein, 42 aa, Artificial Sequence
  chemically synthesized
SQVTPFKIPIEELEDKVFVNCNTSIYRASSLSNCRHTSSVEE

SEQ ID NO: 520 - protein, 42 aa, Artificial Sequence
  chemically synthesized
SQVTPFKIPIEELEDHVFVNCNTSIYRASSLSNCRHTSSVEE

SEQ ID NO: 521 - protein, 42 aa, Artificial Sequence
  chemically synthesized
  misc_feature (16)..(16): Xaa can be a proteinogenic, non-proteinogenic or synthetic amino acid like ornithin or selenocystein
SQVTPFKIPIEELEDXVFVNCNTSIYRASSLSNCRHTSSVEE

SEQ ID NO: 522 - protein, 42 aa, Artificial Sequence
  chemically synthesized
SQVTPFKIPIEELEDRIFVNCNTSIYRASSLSNCRHTSSVEE

SEQ ID NO: 523 - protein, 42 aa, Artificial Sequence
  chemically synthesized
SQVTPFKIPIEELEDRLFVNCNTSIYRASSLSNCRHTSSVEE

SEQ ID NO: 524 - protein, 42 aa, Artificial Sequence
  chemically synthesized
SQVTPFKIPIEELEDRFFVNCNTSIYRASSLSNCRHTSSVEE

SEQ ID NO: 525 - protein, 42 aa, Artificial Sequence
  chemically synthesized
SQVTPFKIPIEELEDRHFVNCNTSIYRASSLSNCRHTSSVEE

SEQ ID NO: 526 - protein, 42 aa, Artificial Sequence
  chemically synthesized
SQVTPFKIPIEELEDRMFVNCNTSIYRASSLSNCRHTSSVEE

SEQ ID NO: 527 - protein, 42 aa, Artificial Sequence
  chemically synthesized
SQVTPFKIPIEELEDRVIVNCNTSIYRASSLSNCRHTSSVEE

SEQ ID NO: 528 - protein, 42 aa, Artificial Sequence
  chemically synthesized
SQVTPFKIPIEELEDRVLVNCNTSIYRASSLSNCRHTSSVEE

SEQ ID NO: 529 - protein, 42 aa, Artificial Sequence
  chemically synthesized
SQVTPFKIPIEELEDRVVVNCNTSIYRASSLSNCRHTSSVEE

SEQ ID NO: 530 - protein, 42 aa, Artificial Sequence
  chemically synthesized
SQVTPFKIPIEELEDRVHVNCNTSIYRASSLSNCRHTSSVEE

SEQ ID NO: 531 - protein, 42 aa, Artificial Sequence
  chemically synthesized
SQVTPFKIPIEELEDRVMVNCNTSIYRASSLSNCRHTSSVEE

SEQ ID NO: 532 - protein, 42 aa, Artificial Sequence
  chemically synthesized
SQVTPFKIPIEELEDRVFINCNTSIYRASSLSNCRHTSSVEE

SEQ ID NO: 533 - protein, 42 aa, Artificial Sequence
  chemically synthesized
SQVTPFKIPIEELEDRVFLNCNTSIYRASSLSNCRHTSSVEE

SEQ ID NO: 534 - protein, 42 aa, Artificial Sequence
  chemically synthesized
SQVTPFKIPIEELEDRVFFNCNTSIYRASSLSNCRHTSSVEE

SEQ ID NO: 535 - protein, 42 aa, Artificial Sequence
  chemically synthesized
SQVTPFKIPIEELEDRVFHNCNTSIYRASSLSNCRHTSSVEE

SEQ ID NO: 536 - protein, 42 aa, Artificial Sequence
  chemically synthesized
SQVTPFKIPIEELEDRVFMNCNTSIYRASSLSNCRHTSSVEE

SEQ ID NO: 537 - protein, 42 aa, Artificial Sequence
  chemically synthesized
SQVTPFKIPIEELEDRVFVQCNTSIYRASSLSNCRHTSSVEE

SEQ ID NO: 538 - protein, 42 aa, Artificial Sequence
  chemically synthesized
SQVTPFKIPIEELEDRVFVNSNTSIYRASSLSNCRHTSSVEE

SEQ ID NO: 539 - protein, 42 aa, Artificial Sequence
  chemically synthesized
SQVTPFKIPIEELEDRVFVNGNTSIYRASSLSNCRHTSSVEE

SEQ ID NO: 540 - protein, 42 aa, Artificial Sequence
  chemically synthesized
SQVTPFKIPIEELEDRVFVNANTSIYRASSLSNCRHTSSVEE

SEQ ID NO: 541 - protein, 42 aa, Artificial Sequence
  chemically synthesized
SQVTPFKIPIEELEDRVFVNCQTSIYRASSLSNCRHTSSVEE

SEQ ID NO: 542 - protein, 42 aa, Artificial Sequence
  chemically synthesized
SQVTPFKIPIEELEDRVFVNCNSSIYRASSLSNCRHTSSVEE

SEQ ID NO: 543 - protein, 42 aa, Artificial Sequence
  chemically synthesized
SQVTPFKIPIEELEDRVFVNCNYSIYRASSLSNCRHTSSVEE

SEQ ID NO: 544 - protein, 42 aa, Artificial Sequence
  chemically synthesized
SQVTPFKIPIEELEDRVFVNCNTTIYRASSLSNCRHTSSVEE

SEQ ID NO: 545 - protein, 42 aa, Artificial Sequence
  chemically synthesized
SQVTPFKIPIEELEDRVFVNCNTYIYRASSLSNCRHTSSVEE

SEQ ID NO: 546 - protein, 42 aa, Artificial Sequence
  chemically synthesized
SQVTPFKIPIEELEDRVFVNCNTSVYRASSLSNCRHTSSVEE

SEQ ID NO: 547 - protein, 42 aa, Artificial Sequence
  chemically synthesized
SQVTPFKIPIEELEDRVFVNCNTSLYRASSLSNCRHTSSVEE

SEQ ID NO: 548 - protein, 42 aa, Artificial Sequence
  chemically synthesized
SQVTPFKIPIEELEDRVFVNCNTSHYRASSLSNCRHTSSVEE

SEQ ID NO: 549 - protein, 42 aa, Artificial Sequence
  chemically synthesized
SQVTPFKIPIEELEDRVFVNCNTSFYRASSLSNCRHTSSVEE

SEQ ID NO: 550 - protein, 42 aa, Artificial Sequence
  chemically synthesized
SQVTPFKIPIEELEDRVFVNCNTSMYRASSLSNCRHTSSVEE

SEQ ID NO: 551 - protein, 42 aa, Artificial Sequence
  chemically synthesized
SQVTPFKIPIEELEDRVFVNCNTSIWRASSLSNCRHTSSVEE

SEQ ID NO: 552 - protein, 42 aa, Artificial Sequence
  chemically synthesized
SQVTPFKIPIEELEDRVFVNCNTSIFRASSLSNCRHTSSVEE

SEQ ID NO: 553 - protein, 42 aa, Artificial Sequence
  chemically synthesized
SQVTPFKIPIEELEDRVFVNCNTSISRASSLSNCRHTSSVEE

SEQ ID NO: 554 - protein, 42 aa, Artificial Sequence
  chemically synthesized
SQVTPFKIPIEELEDRVFVNCNTSITRASSLSNCRHTSSVEE

SEQ ID NO: 555 - protein, 42 aa, Artificial Sequence
  chemically synthesized
  misc_feature (27)..(27): Xaa can be a proteinogenic, non-proteinogenic or synthetic amino acid like ornithin or selenocystein
SQVTPFKIPIEELEDRVFVNCNTSIYXASSLSNCRHTSSVEE

SEQ ID NO: 556 - protein, 42 aa, Artificial Sequence
  chemically synthesized
SQVTPFKIPIEELEDRVFVNCNTSIYHASSLSNCRHTSSVEE

SEQ ID NO: 557 - protein, 42 aa, Artificial Sequence
  chemically synthesized
SQVTPFKIPIEELEDRVFVNCNTSIYKASSLSNCRHTSSVEE

SEQ ID NO: 558 - protein, 42 aa, Artificial Sequence
  chemically synthesized
SQVTPFKIPIEELEDRVFVNCNTSIYRGSSLSNCRHTSSVEE

SEQ ID NO: 559 - protein, 42 aa, Artificial Sequence
  chemically synthesized
SQVTPFKIPIEELEDRVFVNCNTSIYRATSLSNCRHTSSVEE

SEQ ID NO: 560 - protein, 42 aa, Artificial Sequence
  chemically synthesized
SQVTPFKIPIEELEDRVFVNCNTSIYRAYSLSNCRHTSSVEE

SEQ ID NO: 561 - protein, 42 aa, Artificial Sequence
  chemically synthesized
SQVTPFKIPIEELEDRVFVNCNTSIYRASTLSNCRHTSSVEE

SEQ ID NO: 562 - protein, 42 aa, Artificial Sequence
  chemically synthesized
SQVTPFKIPIEELEDRVFVNCNTSIYRASYLSNCRHTSSVEE

SEQ ID NO: 563 - protein, 42 aa, Artificial Sequence
  chemically synthesized
SQVTPFKIPIEELEDRVFVNCNTSIYRASSISNCRHTSSVEE

SEQ ID NO: 564 - protein, 42 aa, Artificial Sequence
  chemically synthesized
SQVTPFKIPIEELEDRVFVNCNTSIYRASSVSNCRHTSSVEE

SEQ ID NO: 565 - protein, 42 aa, Artificial Sequence
  chemically synthesized
SQVTPFKIPIEELEDRVFVNCNTSIYRASSFSNCRHTSSVEE

SEQ ID NO: 566 - protein, 42 aa, Artificial Sequence
  chemically synthesized
SQVTPFKIPIEELEDRVFVNCNTSIYRASSMSNCRHTSSVEE

SEQ ID NO: 567 - protein, 42 aa, Artificial Sequence
  chemically synthesized
SQVTPFKIPIEELEDRVFVNCNTSIYRASSHSNCRHTSSVEE

SEQ ID NO: 568 - protein, 42 aa, Artificial Sequence
  chemically synthesized
SQVTPFKIPIEELEDRVFVNCNTSIYRASSLTNCRHTSSVEE

SEQ ID NO: 569 - protein, 42 aa, Artificial Sequence
  chemically synthesized
SQVTPFKIPIEELEDRVFVNCNTSIYRASSLYNCRHTSSVEE

SEQ ID NO: 570 - protein, 42 aa, Artificial Sequence
  chemically synthesized
SQVTPFKIPIEELEDRVFVNCNTSIYRASSLSQCRHTSSVEE

SEQ ID NO: 571 - protein, 42 aa, Artificial Sequence
  chemically synthesized
SQVTPFKIPIEELEDRVFVNCNTSIYRASSLSNSRHTSSVEE

SEQ ID NO: 572 - protein, 42 aa, Artificial Sequence
  chemically synthesized
SQVTPFKIPIEELEDRVFVNCNTSIYRASSLSNGRHTSSVEE

SEQ ID NO: 573 - protein, 42 aa, Artificial Sequence
  chemically synthesized
SQVTPFKIPIEELEDRVFVNCNTSIYRASSLSNARHTSSVEE

SEQ ID NO: 574 - protein, 42 aa, Artificial Sequence
  chemically synthesized
  misc_feature (35)..(35): Xaa can be a proteinogenic, non-proteinogenic or synthetic amino acid like ornithin or selenocystein
SQVTPFKIPIEELEDRVFVNCNTSIYRASSLSNCXHTSSVEE

SEQ ID NO: 575 - protein, 42 aa, Artificial Sequence
  chemically synthesized
SQVTPFKIPIEELEDRVFVNCNTSIYRASSLSNCHHTSSVEE

SEQ ID NO: 576 - protein, 42 aa, Artificial Sequence
  chemically synthesized
SQVTPFKIPIEELEDRVFVNCNTSIYRASSLSNCKHTSSVEE

SEQ ID NO: 577 - protein, 42 aa, Artificial Sequence
  chemically synthesized
SQVTPFKIPIEELEDRVFVNCNTSIYRASSLSNCRGTSSVEE

SEQ ID NO: 578 - protein, 42 aa, Artificial Sequence
  chemically synthesized
SQVTPFKIPIEELEDRVFVNCNTSIYRASSLSNCRATSSVEE

SEQ ID NO: 579 - protein, 42 aa, Artificial Sequence
  chemically synthesized
SQVTPFKIPIEELEDRVFVNCNTSIYRASSLSNCRITSSVEE

SEQ ID NO: 580 - protein, 42 aa, Artificial Sequence
  chemically synthesized
SQVTPFKIPIEELEDRVFVNCNTSIYRASSLSNCRLTSSVEE

SEQ ID NO: 581 - protein, 42 aa, Artificial Sequence
  chemically synthesized
SQVTPFKIPIEELEDRVFVNCNTSIYRASSLSNCRMTSSVEE

SEQ ID NO: 582 - protein, 42 aa, Artificial Sequence
  chemically synthesized
SQVTPFKIPIEELEDRVFVNCNTSIYRASSLSNCRVTSSVEE

SEQ ID NO: 583 - protein, 42 aa, Artificial Sequence
  chemically synthesized
SQVTPFKIPIEELEDRVFVNCNTSIYRASSLSNCRHSSSVEE

SEQ ID NO: 584 - protein, 42 aa, Artificial Sequence
  chemically synthesized
SQVTPFKIPIEELEDRVFVNCNTSIYRASSLSNCRHYSSVEE

SEQ ID NO: 585 - protein, 42 aa, Artificial Sequence
  chemically synthesized
SQVTPFKIPIEELEDRVFVNCNTSIYRASSLSNCRHTTSVEE

SEQ ID NO: 586 - protein, 42 aa, Artificial Sequence
  chemically synthesized
SQVTPFKIPIEELEDRVFVNCNTSIYRASSLSNCRHTYSVEE

SEQ ID NO: 587 - protein, 42 aa, Artificial Sequence
  chemically synthesized
SQVTPFKIPIEELEDRVFVNCNTSIYRASSLSNCRHTSTVEE

SEQ ID NO: 588 - protein, 42 aa, Artificial Sequence
  chemically synthesized
SQVTPFKIPIEELEDRVFVNCNTSIYRASSLSNCRHTSYVEE

SEQ ID NO: 589 - protein, 42 aa, Artificial Sequence
  chemically synthesized
SQVTPFKIPIEELEDRVFVNCNTSIYRASSLSNCRHTSSIEE

SEQ ID NO: 590 - protein, 42 aa, Artificial Sequence
  chemically synthesized
SQVTPFKIPIEELEDRVFVNCNTSIYRASSLSNCRHTSSLEE

SEQ ID NO: 591 - protein, 42 aa, Artificial Sequence
  chemically synthesized
SQVTPFKIPIEELEDRVFVNCNTSIYRASSLSNCRHTSSFEE

SEQ ID NO: 592 - protein, 42 aa, Artificial Sequence
  chemically synthesized
SQVTPFKIPIEELEDRVFVNCNTSIYRASSLSNCRHTSSHEE

SEQ ID NO: 593 - protein, 42 aa, Artificial Sequence
  chemically synthesized
SQVTPFKIPIEELEDRVFVNCNTSIYRASSLSNCRHTSSMEE

SEQ ID NO: 594 - protein, 42 aa, Artificial Sequence
  chemically synthesized
SQVTPFKIPIEELEDRVFVNCNTSIYRASSLSNCRHTSSVDE

SEQ ID NO: 595 - protein, 42 aa, Artificial Sequence
  chemically synthesized
  misc_feature (41)..(41): Xaa can be a proteinogenic, non-proteinogenic or synthetic amino acid like ornithin or selenocystein
SQVTPFKIPIEELEDRVFVNCNTSIYRASSLSNCRHTSSVXE

SEQ ID NO: 596 - protein, 42 aa, Artificial Sequence
  chemically synthesized
SQVTPFKIPIEELEDRVFVNCNTSIYRASSLSNCRHTSSVED

SEQ ID NO: 597 - protein, 42 aa, Artificial Sequence
  chemically synthesized
  misc_feature (42)..(42): Xaa can be a proteinogenic, non-proteinogenic or synthetic amino acid like ornithin or selenocystein
SQVTPFKIPIEELEDRVFVNCNTSIYRASSLSNCRHTSSVEX

SEQ ID NO: 598 - protein, 42 aa, Artificial Sequence
  chemically synthesized
SQVTAFKIPIEELEDRVFVNCNTSIYRASSLSNCRHTSSVEE

SEQ ID NO: 599 - protein, 42 aa, Artificial Sequence
  chemically synthesized
SQVTGFKIPIEELEDRVFVNCNTSIYRASSLSNCRHTSSVEE

SEQ ID NO: 600 - protein, 42 aa, Artificial Sequence
  chemically synthesized
SQVTPFKIAIEELEDRVFVNCNTSIYRASSLSNCRHTSSVEE

SEQ ID NO: 601 - protein, 42 aa, Artificial Sequence
  chemically synthesized
SQVTPFKIGIEELEDRVFVNCNTSIYRASSLSNCRHTSSVEE

SEQ ID NO: 602 - protein, 42 aa, Artificial Sequence; identical to SEQ ID NO: 17
  chemically synthesized

SEQ ID NO: 603 - protein, 42 aa, Artificial Sequence; identical to SEQ ID NO: 136
  chemically synthesized

SEQ ID NO: 604 - protein, 42 aa, Artificial Sequence
  chemically synthesized
YQVSPFRIPIEELEDRVFVNCNTSIYRASSLSNCRHTSSVEE

SEQ ID NO: 605 - protein, 42 aa, Artificial Sequence; identical to SEQ ID NO: 256
  chemically synthesized

SEQ ID NO: 606 - protein, 42 aa, Artificial Sequence; identical to SEQ ID NO: 374
  chemically synthesized

SEQ ID NO: 607 - protein, 42 aa, Artificial Sequence
  chemically synthesized
SQISPFRIPIEELEDRVFVNCNTSIYRASSLSNCRHTSSVEE

SEQ ID NO: 608 - protein, 42 aa, Artificial Sequence
  chemically synthesized
SQPSPFRIPIEELEDRVFVNCNTSIYRASSLSNCRHTSSVEE

SEQ ID NO: 609 - protein, 42 aa, Artificial Sequence
  chemically synthesized
SQFSPFRIPIEELEDRVFVNCNTSIYRASSLSNCRHTSSVEE

SEQ ID NO: 610 - protein, 42 aa, Artificial Sequence; identical to SEQ ID NO: 493
  chemically synthesized

SEQ ID NO: 611 - protein, 42 aa, Artificial Sequence
  chemically synthesized
SQVYPFRIPIEELEDRVFVNCNTSIYRASSLSNCRHTSSVEE

SEQ ID NO: 612 - protein, 42 aa, Artificial Sequence
  chemically synthesized
SQVSPWRIPIEELEDRVFVNCNTSIYRASSLSNCRHTSSVEE

SEQ ID NO: 613 - protein, 42 aa, Artificial Sequence
  chemically synthesized
SQVSPYRIPIEELEDRVFVNCNTSIYRASSLSNCRHTSSVEE

SEQ ID NO: 614 - protein, 42 aa, Artificial Sequence
  chemically synthesized
SQVSPHRIPIEELEDRVFVNCNTSIYRASSLSNCRHTSSVEE

SEQ ID NO: 615 - protein, 42 aa, Artificial Sequence; identical to SEQ ID NO: 17
  chemically synthesized

SEQ ID NO: 616 - protein, 42 aa, Artificial Sequence; identical to SEQ ID NO: 17
  chemically synthesized

SEQ ID NO: 617 - protein, 42 aa, Artificial Sequence
  chemically synthesized
SQFSPFRLPIEELEDRVFVNCNTSIYRASSLSNCRHTSSVEE

SEQ ID NO: 618 - protein, 42 aa, Artificial Sequence
  chemically synthesized
SQFSPFRHPIEELEDRVFVNCNTSIYRASSLSNCRHTSSVEE

SEQ ID NO: 619 - protein, 42 aa, Artificial Sequence
  chemically synthesized
SQFSPFRVPIEELEDRVFVNCNTSIYRASSLSNCRHTSSVEE

SEQ ID NO: 620 - protein, 42 aa, Artificial Sequence
  chemically synthesized
SQFSPFRFPIEELEDRVFVNCNTSIYRASSLSNCRHTSSVEE

SEQ ID NO: 621 - protein, 42 aa, Artificial Sequence
  chemically synthesized
SQFSPFRMPIEELEDRVFVNCNTSIYRASSLSNCRHTSSVEE

SEQ ID NO: 622 - protein, 42 aa, Artificial Sequence
  chemically synthesized
SQFSPFRIPLEELEDRVFVNCNTSIYRASSLSNCRHTSSVEE

SEQ ID NO: 623 - protein, 42 aa, Artificial Sequence
  chemically synthesized
SQFSPFRIPHEELEDRVFVNCNTSIYRASSLSNCRHTSSVEE

SEQ ID NO: 624 - protein, 42 aa, Artificial Sequence
  chemically synthesized
SQFSPFRIPVEELEDRVFVNCNTSIYRASSLSNCRHTSSVEE

SEQ ID NO: 625 - protein, 42 aa, Artificial Sequence
  chemically synthesized
SQFSPFRIPFEELEDRVFVNCNTSIYRASSLSNCRHTSSVEE

SEQ ID NO: 626 - protein, 42 aa, Artificial Sequence
  chemically synthesized
SQFSPFRIPMEELEDRVFVNCNTSIYRASSLSNCRHTSSVEE

SEQ ID NO: 627 - protein, 42 aa, Artificial Sequence
  chemically synthesized
SQFSPFRIPIDELEDRVFVNCNTSIYRASSLSNCRHTSSVEE

SEQ ID NO: 628 - protein, 42 aa, Artificial Sequence
  chemically synthesized
  misc_feature (11)..(11): Xaa can be a proteinogenic, non-proteinogenic or synthetic amino acid like ornithin or selenocystein
SQFSPFRIPIXELEDRVFVNCNTSIYRASSLSNCRHTSSVEE

SEQ ID NO: 629 - protein, 42 aa, Artificial Sequence
  chemically synthesized
SQFSPFRIPIEDLEDRVFVNCNTSIYRASSLSNCRHTSSVEE

SEQ ID NO: 630 - protein, 42 aa, Artificial Sequence
  chemically synthesized
  misc_feature (12)..(12): Xaa can be a proteinogenic, non-proteinogenic or synthetic amino acid like ornithin or selenocystein
SQFSPFRIPIEXLEDRVFVNCNTSIYRASSLSNCRHTSSVEE

SEQ ID NO: 631 - protein, 42 aa, Artificial Sequence
  chemically synthesized
SQFSPFRIPIEEVEDRVFVNCNTSIYRASSLSNCRHTSSVEE

SEQ ID NO: 632 - protein, 42 aa, Artificial Sequence
  chemically synthesized
SQFSPFRIPIEEIEDRVFVNCNTSIYRASSLSNCRHTSSVEE

SEQ ID NO: 633 - protein, 42 aa, Artificial Sequence
  chemically synthesized
SQFSPFRIPIEEFEDRVFVNCNTSIYRASSLSNCRHTSSVEE

SEQ ID NO: 634 - protein, 42 aa, Artificial Sequence
  chemically synthesized
SQFSPFRIPIEEHEDRVFVNCNTSIYRASSLSNCRHTSSVEE

SEQ ID NO: 635 - protein, 42 aa, Artificial Sequence
  chemically synthesized
SQFSPFRIPIEEMEDRVFVNCNTSIYRASSLSNCRHTSSVEE

SEQ ID NO: 636 - protein, 42 aa, Artificial Sequence
  chemically synthesized
SQFSPFRIPIEELDDRVFVNCNTSIYRASSLSNCRHTSSVEE

SEQ ID NO: 637 - protein, 42 aa, Artificial Sequence
  chemically synthesized
  misc_feature (14)..(14): Xaa can be a proteinogenic, non-proteinogenic or synthetic amino acid like ornithin or selenocystein
SQFSPFRIPIEELXDRVFVNCNTSIYRASSLSNCRHTSSVEE

SEQ ID NO: 638 - protein, 42 aa, Artificial Sequence
  chemically synthesized
  misc_feature (15)..(15): Xaa can be a proteinogenic, non-proteinogenic or synthetic amino acid like ornithin or selenocystein
SQFSPFRIPIEELEXRVFVNCNTSIYRASSLSNCRHTSSVEE

SEQ ID NO: 639 - protein, 42 aa, Artificial Sequence
  chemically synthesized
SQFSPFRIPIEELEERVFVNCNTSIYRASSLSNCRHTSSVEE

SEQ ID NO: 640 - protein, 42 aa, Artificial Sequence
  chemically synthesized
SQFSPFRIPIEELEDKVFVNCNTSIYRASSLSNCRHTSSVEE

SEQ ID NO: 641 - protein, 42 aa, Artificial Sequence
  chemically synthesized
SQFSPFRIPIEELEDHVFVNCNTSIYRASSLSNCRHTSSVEE

SEQ ID NO: 642 - protein, 42 aa, Artificial Sequence
  chemically synthesized
  misc_feature (16)..(16): Xaa can be a proteinogenic, non-proteinogenic or synthetic amino acid like ornithin or selenocystein
SQFSPFRIPIEELEDXVFVNCNTSIYRASSLSNCRHTSSVEE

SEQ ID NO: 643 - protein, 42 aa, Artificial Sequence
  chemically synthesized
SQFSPFRIPIEELEDRIFVNCNTSIYRASSLSNCRHTSSVEE

SEQ ID NO: 644 - protein, 42 aa, Artificial Sequence
  chemically synthesized
SQFSPFRIPIEELEDRLFVNCNTSIYRASSLSNCRHTSSVEE

SEQ ID NO: 645 - protein, 42 aa, Artificial Sequence
  chemically synthesized
SQFSPFRIPIEELEDRFFVNCNTSIYRASSLSNCRHTSSVEE

SEQ ID NO: 646 - protein, 42 aa, Artificial Sequence
  chemically synthesized
SQFSPFRIPIEELEDRHFVNCNTSIYRASSLSNCRHTSSVEE

SEQ ID NO: 647 - protein, 42 aa, Artificial Sequence
  chemically synthesized
SQFSPFRIPIEELEDRMFVNCNTSIYRASSLSNCRHTSSVEE

SEQ ID NO: 648 - protein, 42 aa, Artificial Sequence
  chemically synthesized
SQFSPFRIPIEELEDRVIVNCNTSIYRASSLSNCRHTSSVEE

SEQ ID NO: 649 - protein, 42 aa, Artificial Sequence
  chemically synthesized
SQFSPFRIPIEELEDRVLVNCNTSIYRASSLSNCRHTSSVEE

SEQ ID NO: 650 - protein, 42 aa, Artificial Sequence
  chemically synthesized
SQFSPFRIPIEELEDRVVVNCNTSIYRASSLSNCRHTSSVEE

SEQ ID NO: 651 - protein, 42 aa, Artificial Sequence
  chemically synthesized
SQFSPFRIPIEELEDRVHVNCNTSIYRASSLSNCRHTSSVEE

SEQ ID NO: 652 - protein, 42 aa, Artificial Sequence
  chemically synthesized
SQFSPFRIPIEELEDRVMVNCNTSIYRASSLSNCRHTSSVEE

SEQ ID NO: 653 - protein, 42 aa, Artificial Sequence
  chemically synthesized
SQFSPFRIPIEELEDRVFINCNTSIYRASSLSNCRHTSSVEE

SEQ ID NO: 654 - protein, 42 aa, Artificial Sequence
  chemically synthesized
SQFSPFRIPIEELEDRVFLNCNTSIYRASSLSNCRHTSSVEE

SEQ ID NO: 655 - protein, 42 aa, Artificial Sequence
  chemically synthesized
SQFSPFRIPIEELEDRVFFNCNTSIYRASSLSNCRHTSSVEE

SEQ ID NO: 656 - protein, 42 aa, Artificial Sequence
  chemically synthesized
SQFSPFRIPIEELEDRVFHNCNTSIYRASSLSNCRHTSSVEE

SEQ ID NO: 657 - protein, 42 aa, Artificial Sequence
  chemically synthesized
SQFSPFRIPIEELEDRVFMNCNTSIYRASSLSNCRHTSSVEE

SEQ ID NO: 658 - protein, 42 aa, Artificial Sequence
  chemically synthesized
SQFSPFRIPIEELEDRVFVQCNTSIYRASSLSNCRHTSSVEE

SEQ ID NO: 659 - protein, 42 aa, Artificial Sequence
  chemically synthesized
SQFSPFRIPIEELEDRVFVNSNTSIYRASSLSNCRHTSSVEE

SEQ ID NO: 660 - protein, 42 aa, Artificial Sequence
  chemically synthesized
SQFSPFRIPIEELEDRVFVNGNTSIYRASSLSNCRHTSSVEE

SEQ ID NO: 661 - protein, 42 aa, Artificial Sequence
  chemically synthesized
SQFSPFRIPIEELEDRVFVNANTSIYRASSLSNCRHTSSVEE

SEQ ID NO: 662 - protein, 42 aa, Artificial Sequence
  chemically synthesized
SQFSPFRIPIEELEDRVFVNCQTSIYRASSLSNCRHTSSVEE

SEQ ID NO: 663 - protein, 42 aa, Artificial Sequence
  chemically synthesized
SQFSPFRIPIEELEDRVFVNCNSSIYRASSLSNCRHTSSVEE

SEQ ID NO: 664 - protein, 42 aa, Artificial Sequence
  chemically synthesized
SQFSPFRIPIEELEDRVFVNCNYSIYRASSLSNCRHTSSVEE

SEQ ID NO: 665 - protein, 42 aa, Artificial Sequence
  chemically synthesized
SQFSPFRIPIEELEDRVFVNCNTTIYRASSLSNCRHTSSVEE

SEQ ID NO: 666 - protein, 42 aa, Artificial Sequence
  chemically synthesized
SQFSPFRIPIEELEDRVFVNCNTYIYRASSLSNCRHTSSVEE

SEQ ID NO: 667 - protein, 42 aa, Artificial Sequence
  chemically synthesized
SQFSPFRIPIEELEDRVFVNCNTSVYRASSLSNCRHTSSVEE

SEQ ID NO: 668 - protein, 42 aa, Artificial Sequence
  chemically synthesized
SQFSPFRIPIEELEDRVFVNCNTSLYRASSLSNCRHTSSVEE

SEQ ID NO: 669 - protein, 42 aa, Artificial Sequence
  chemically synthesized
SQFSPFRIPIEELEDRVFVNCNTSHYRASSLSNCRHTSSVEE

SEQ ID NO: 670 - protein, 42 aa, Artificial Sequence
  chemically synthesized
SQFSPFRIPIEELEDRVFVNCNTSFYRASSLSNCRHTSSVEE

SEQ ID NO: 671 - protein, 42 aa, Artificial Sequence
  chemically synthesized
SQFSPFRIPIEELEDRVFVNCNTSMYRASSLSNCRHTSSVEE

SEQ ID NO: 672 - protein, 42 aa, Artificial Sequence
  chemically synthesized
SQFSPFRIPIEELEDRVFVNCNTSIWRASSLSNCRHTSSVEE

SEQ ID NO: 673 - protein, 42 aa, Artificial Sequence
  chemically synthesized
SQFSPFRIPIEELEDRVFVNCNTSIFRASSLSNCRHTSSVEE

SEQ ID NO: 674 - protein, 42 aa, Artificial Sequence
  chemically synthesized
SQFSPFRIPIEELEDRVFVNCNTSISRASSLSNCRHTSSVEE

SEQ ID NO: 675 - protein, 42 aa, Artificial Sequence
  chemically synthesized
SQFSPFRIPIEELEDRVFVNCNTSITRASSLSNCRHTSSVEE

SEQ ID NO: 676 - protein, 42 aa, Artificial Sequence
  chemically synthesized
  misc_feature (27)..(27): Xaa can be a proteinogenic, non-proteinogenic or synthetic amino acid like ornithin or selenocystein
SQFSPFRIPIEELEDRVFVNCNTSIYXASSLSNCRHTSSVEE

SEQ ID NO: 677 - protein, 42 aa, Artificial Sequence
  chemically synthesized
SQFSPFRIPIEELEDRVFVNCNTSIYHASSLSNCRHTSSVEE

SEQ ID NO: 678 - protein, 42 aa, Artificial Sequence
  chemically synthesized
SQFSPFRIPIEELEDRVFVNCNTSIYKASSLSNCRHTSSVEE

SEQ ID NO: 679 - protein, 42 aa, Artificial Sequence
  chemically synthesized
SQFSPFRIPIEELEDRVFVNCNTSIYRGSSLSNCRHTSSVEE

SEQ ID NO: 680 - protein, 42 aa, Artificial Sequence
  chemically synthesized
SQFSPFRIPIEELEDRVFVNCNTSIYRATSLSNCRHTSSVEE

SEQ ID NO: 681 - protein, 42 aa, Artificial Sequence
  chemically synthesized
SQFSPFRIPIEELEDRVFVNCNTSIYRAYSLSNCRHTSSVEE

SEQ ID NO: 682 - protein, 42 aa, Artificial Sequence
  chemically synthesized
SQFSPFRIPIEELEDRVFVNCNTSIYRASTLSNCRHTSSVEE

SEQ ID NO: 683 - protein, 42 aa, Artificial Sequence
  chemically synthesized
SQFSPFRIPIEELEDRVFVNCNTSIYRASYLSNCRHTSSVEE

SEQ ID NO: 684 - protein, 42 aa, Artificial Sequence
  chemically synthesized
SQFSPFRIPIEELEDRVFVNCNTSIYRASSISNCRHTSSVEE

SEQ ID NO: 685 - protein, 42 aa, Artificial Sequence
  chemically synthesized
SQFSPFRIPIEELEDRVFVNCNTSIYRASSVSNCRHTSSVEE

SEQ ID NO: 686 - protein, 42 aa, Artificial Sequence
  chemically synthesized
SQFSPFRIPIEELEDRVFVNCNTSIYRASSFSNCRHTSSVEE

SEQ ID NO: 687 - protein, 42 aa, Artificial Sequence
  chemically synthesized
SQFSPFRIPIEELEDRVFVNCNTSIYRASSMSNCRHTSSVEE

SEQ ID NO: 688 - protein, 42 aa, Artificial Sequence
  chemically synthesized
SQFSPFRIPIEELEDRVFVNCNTSIYRASSHSNCRHTSSVEE

SEQ ID NO: 689 - protein, 42 aa, Artificial Sequence
  chemically synthesized
SQFSPFRIPIEELEDRVFVNCNTSIYRASSLTNCRHTSSVEE

SEQ ID NO: 690 - protein, 42 aa, Artificial Sequence
  chemically synthesized
SQFSPFRIPIEELEDRVFVNCNTSIYRASSLYNCRHTSSVEE

SEQ ID NO: 691 - protein, 42 aa, Artificial Sequence
  chemically synthesized
SQFSPFRIPIEELEDRVFVNCNTSIYRASSLSQCRHTSSVEE

SEQ ID NO: 692 - protein, 42 aa, Artificial Sequence
  chemically synthesized
SQFSPFRIPIEELEDRVFVNCNTSIYRASSLSNSRHTSSVEE

SEQ ID NO: 693 - protein, 42 aa, Artificial Sequence
  chemically synthesized
SQFSPFRIPIEELEDRVFVNCNTSIYRASSLSNGRHTSSVEE

SEQ ID NO: 694 - protein, 42 aa, Artificial Sequence
  chemically synthesized
SQFSPFRIPIEELEDRVFVNCNTSIYRASSLSNARHTSSVEE

SEQ ID NO: 695 - protein, 42 aa, Artificial Sequence
  chemically synthesized
  misc_feature (35)..(35): Xaa can be a proteinogenic, non-proteinogenic or synthetic amino acid like ornithin or selenocystein
SQFSPFRIPIEELEDRVFVNCNTSIYRASSLSNCXHTSSVEE

SEQ ID NO: 696 - protein, 42 aa, Artificial Sequence
  chemically synthesized
SQFSPFRIPIEELEDRVFVNCNTSIYRASSLSNCHHTSSVEE

SEQ ID NO: 697 - protein, 42 aa, Artificial Sequence
  chemically synthesized
SQFSPFRIPIEELEDRVFVNCNTSIYRASSLSNCKHTSSVEE

SEQ ID NO: 698 - protein, 42 aa, Artificial Sequence
  chemically synthesized
SQFSPFRIPIEELEDRVFVNCNTSIYRASSLSNCRGTSSVEE

SEQ ID NO: 699 - protein, 42 aa, Artificial Sequence
  chemically synthesized
SQFSPFRIPIEELEDRVFVNCNTSIYRASSLSNCRATSSVEE

SEQ ID NO: 700 - protein, 42 aa, Artificial Sequence
  chemically synthesized
SQFSPFRIPIEELEDRVFVNCNTSIYRASSLSNCRITSSVEE

SEQ ID NO: 701 - protein, 42 aa, Artificial Sequence
  chemically synthesized
SQFSPFRIPIEELEDRVFVNCNTSIYRASSLSNCRLTSSVEE

SEQ ID NO: 702 - protein, 42 aa, Artificial Sequence
  chemically synthesized
SQFSPFRIPIEELEDRVFVNCNTSIYRASSLSNCRMTSSVEE

SEQ ID NO: 703 - protein, 42 aa, Artificial Sequence
  chemically synthesized
SQFSPFRIPIEELEDRVFVNCNTSIYRASSLSNCRVTSSVEE

SEQ ID NO: 704 - protein, 42 aa, Artificial Sequence
  chemically synthesized
SQFSPFRIPIEELEDRVFVNCNTSIYRASSLSNCRHSSSVEE

SEQ ID NO: 705 - protein, 42 aa, Artificial Sequence
  chemically synthesized
SQFSPFRIPIEELEDRVFVNCNTSIYRASSLSNCRHYSSVEE

SEQ ID NO: 706 - protein, 42 aa, Artificial Sequence
  chemically synthesized
SQFSPFRIPIEELEDRVFVNCNTSIYRASSLSNCRHTTSVEE

SEQ ID NO: 707 - protein, 42 aa, Artificial Sequence
  chemically synthesized
SQFSPFRIPIEELEDRVFVNCNTSIYRASSLSNCRHTYSVEE

SEQ ID NO: 708 - protein, 42 aa, Artificial Sequence
  chemically synthesized
SQFSPFRIPIEELEDRVFVNCNTSIYRASSLSNCRHTSTVEE

SEQ ID NO: 709 - protein, 42 aa, Artificial Sequence
  chemically synthesized
SQFSPFRIPIEELEDRVFVNCNTSIYRASSLSNCRHTSYVEE

SEQ ID NO: 710 - protein, 42 aa, Artificial Sequence
  chemically synthesized
SQFSPFRIPIEELEDRVFVNCNTSIYRASSLSNCRHTSSIEE

SEQ ID NO: 711 - protein, 42 aa, Artificial Sequence
  chemically synthesized
SQFSPFRIPIEELEDRVFVNCNTSIYRASSLSNCRHTSSLEE

SEQ ID NO: 712 - protein, 42 aa, Artificial Sequence
  chemically synthesized
SQFSPFRIPIEELEDRVFVNCNTSIYRASSLSNCRHTSSFEE

SEQ ID NO: 713 - protein, 42 aa, Artificial Sequence
  chemically synthesized
SQFSPFRIPIEELEDRVFVNCNTSIYRASSLSNCRHTSSHEE

SEQ ID NO: 714 - protein, 42 aa, Artificial Sequence
  chemically synthesized
SQFSPFRIPIEELEDRVFVNCNTSIYRASSLSNCRHTSSMEE

SEQ ID NO: 715 - protein, 42 aa, Artificial Sequence
  chemically synthesized
SQFSPFRIPIEELEDRVFVNCNTSIYRASSLSNCRHTSSVDE

SEQ ID NO: 716 - protein, 42 aa, Artificial Sequence
  chemically synthesized
  misc_feature (41)..(41): Xaa can be a proteinogenic, non-proteinogenic or synthetic amino acid like ornithin or selenocystein
SQFSPFRIPIEELEDRVFVNCNTSIYRASSLSNCRHTSSVXE

SEQ ID NO: 717 - protein, 42 aa, Artificial Sequence
  chemically synthesized
SQFSPFRIPIEELEDRVFVNCNTSIYRASSLSNCRHTSSVED

SEQ ID NO: 718 - protein, 42 aa, Artificial Sequence
  chemically synthesized
  misc_feature (42)..(42): Xaa can be a proteinogenic, non-proteinogenic or synthetic amino acid like ornithin or selenocystein
SQFSPFRIPIEELEDRVFVNCNTSIYRASSLSNCRHTSSVEX

SEQ ID NO: 719 - protein, 42 aa, Artificial Sequence; identical to SEQ ID NO: 122
  chemically synthesized

SEQ ID NO: 720 - protein, 42 aa, Artificial Sequence; identical to SEQ ID NO: 123
  chemically synthesized

SEQ ID NO: 721 - protein, 42 aa, Artificial Sequence
  chemically synthesized
SQFSPFRIAIEELEDRVFVNCNTSIYRASSLSNCRHTSSVEE

SEQ ID NO: 722 - protein, 42 aa, Artificial Sequence
  chemically synthesized
SQFSPFRIGIEELEDRVFVNCNTSIYRASSLSNCRHTSSVEE

SEQ ID NO: 723 - protein, 42 aa, Artificial Sequence; identical to SEQ ID NO: 20
  chemically synthesized

SEQ ID NO: 724 - protein, 42 aa, Artificial Sequence; identical to SEQ ID NO: 139
  chemically synthesized

SEQ ID NO: 725 - protein, 42 aa, Artificial Sequence
  chemically synthesized
YQVSPFKLPIEELEDRVFVNCNTSIYRASSLSNCRHTSSVEE

SEQ ID NO: 726 - protein, 42 aa, Artificial Sequence; identical to SEQ ID NO: 259
  chemically synthesized

SEQ ID NO: 727 - protein, 42 aa, Artificial Sequence; identical to SEQ ID NO: 377
  chemically synthesized

SEQ ID NO: 728 - protein, 42 aa, Artificial Sequence
  chemically synthesized
SQISPFKLPIEELEDRVFVNCNTSIYRASSLSNCRHTSSVEE

SEQ ID NO: 729 - protein, 42 aa, Artificial Sequence
  chemically synthesized
SQPSPFKLPIEELEDRVFVNCNTSIYRASSLSNCRHTSSVEE

SEQ ID NO: 730 - protein, 42 aa, Artificial Sequence
  chemically synthesized
SQFSPFKLPIEELEDRVFVNCNTSIYRASSLSNCRHTSSVEE

SEQ ID NO: 731 - protein, 42 aa, Artificial Sequence; identical to SEQ ID NO: 496
  chemically synthesized

SEQ ID NO: 732 - protein, 42 aa, Artificial Sequence
  chemically synthesized
SQVYPFKLPIEELEDRVFVNCNTSIYRASSLSNCRHTSSVEE

SEQ ID NO: 733 - protein, 42 aa, Artificial Sequence
  chemically synthesized
SQVSPWKLPIEELEDRVFVNCNTSIYRASSLSNCRHTSSVEE

SEQ ID NO: 734 - protein, 42 aa, Artificial Sequence
  chemically synthesized
SQVSPYKLPIEELEDRVFVNCNTSIYRASSLSNCRHTSSVEE

SEQ ID NO: 735 - protein, 42 aa, Artificial Sequence
  chemically synthesized
SQVSPHKLPIEELEDRVFVNCNTSIYRASSLSNCRHTSSVEE

SEQ ID NO: 736 - protein, 42 aa, Artificial Sequence
  chemically synthesized
SQVSPFRLPIEELEDRVFVNCNTSIYRASSLSNCRHTSSVEE

SEQ ID NO: 737 - protein, 42 aa, Artificial Sequence
  chemically synthesized
SQVSPFHLPIEELEDRVFVNCNTSIYRASSLSNCRHTSSVEE

SEQ ID NO: 738 - protein, 42 aa, Artificial Sequence
  chemically synthesized
  misc_feature (7)..(7): Xaa can be a proteinogenic, non-proteinogenic or synthetic amino acid like ornithin or selenocystein
SQVSPFXLPIEELEDRVFVNCNTSIYRASSLSNCRHTSSVEE

SEQ ID NO: 739 - protein, 42 aa, Artificial Sequence; identical to SEQ ID NO: 20
  chemically synthesized

SEQ ID NO: 740 - protein, 42 aa, Artificial Sequence
  chemically synthesized
SQVSPFKLPLEELEDRVFVNCNTSIYRASSLSNCRHTSSVEE

SEQ ID NO: 741 - protein, 42 aa, Artificial Sequence
  chemically synthesized
SQVSPFKLPHEELEDRVFVNCNTSIYRASSLSNCRHTSSVEE

SEQ ID NO: 742 - protein, 42 aa, Artificial Sequence
  chemically synthesized
SQVSPFKLPVEELEDRVFVNCNTSIYRASSLSNCRHTSSVEE

SEQ ID NO: 743 - protein, 42 aa, Artificial Sequence
  chemically synthesized
SQVSPFKLPFEELEDRVFVNCNTSIYRASSLSNCRHTSSVEE

SEQ ID NO: 744 - protein, 42 aa, Artificial Sequence
  chemically synthesized
SQVSPFKLPMEELEDRVFVNCNTSIYRASSLSNCRHTSSVEE

SEQ ID NO: 745 - protein, 42 aa, Artificial Sequence
  chemically synthesized
SQVSPFKLPIDELEDRVFVNCNTSIYRASSLSNCRHTSSVEE

SEQ ID NO: 746 - protein, 42 aa, Artificial Sequence
  chemically synthesized
  misc_feature (11)..(11): Xaa can be a proteinogenic, non-proteinogenic or synthetic amino acid like ornithin or selenocystein
SQVSPFKLPIXELEDRVFVNCNTSIYRASSLSNCRHTSSVEE

SEQ ID NO: 747 - protein, 42 aa, Artificial Sequence
  chemically synthesized
SQVSPFKLPIEDLEDRVFVNCNTSIYRASSLSNCRHTSSVEE

SEQ ID NO: 748 - protein, 42 aa, Artificial Sequence
  chemically synthesized
  misc_feature (12)..(12): Xaa can be a proteinogenic, non-proteinogenic or synthetic amino acid like ornithin or selenocystein
SQVSPFKLPIEXLEDRVFVNCNTSIYRASSLSNCRHTSSVEE

SEQ ID NO: 749 - protein, 42 aa, Artificial Sequence
  chemically synthesized
SQVSPFKLPIEEVEDRVFVNCNTSIYRASSLSNCRHTSSVEE

SEQ ID NO: 750 - protein, 42 aa, Artificial Sequence
  chemically synthesized
SQVSPFKLPIEEIEDRVFVNCNTSIYRASSLSNCRHTSSVEE

SEQ ID NO: 751 - protein, 42 aa, Artificial Sequence
  chemically synthesized
SQVSPFKLPIEEFEDRVFVNCNTSIYRASSLSNCRHTSSVEE

SEQ ID NO: 752 - protein, 42 aa, Artificial Sequence
  chemically synthesized
SQVSPFKLPIEEHEDRVFVNCNTSIYRASSLSNCRHTSSVEE

SEQ ID NO: 753 - protein, 42 aa, Artificial Sequence
  chemically synthesized
SQVSPFKLPIEEMEDRVFVNCNTSIYRASSLSNCRHTSSVEE

SEQ ID NO: 754 - protein, 42 aa, Artificial Sequence
  chemically synthesized
SQVSPFKLPIEELDDRVFVNCNTSIYRASSLSNCRHTSSVEE

SEQ ID NO: 755 - protein, 42 aa, Artificial Sequence
  chemically synthesized
  misc_feature (14)..(14): Xaa can be a proteinogenic, non-proteinogenic or synthetic amino acid like ornithin or selenocystein
SQVSPFKLPIEELXDRVFVNCNTSIYRASSLSNCRHTSSVEE

SEQ ID NO: 756 - protein, 42 aa, Artificial Sequence
  chemically synthesized
  misc_feature (15)..(15): Xaa can be a proteinogenic, non-proteinogenic or synthetic amino acid like ornithin or selenocystein
SQVSPFKLPIEELEXRVFVNCNTSIYRASSLSNCRHTSSVEE

SEQ ID NO: 757 - protein, 42 aa, Artificial Sequence
  chemically synthesized
SQVSPFKLPIEELEERVFVNCNTSIYRASSLSNCRHTSSVEE

SEQ ID NO: 758 - protein, 42 aa, Artificial Sequence
  chemically synthesized
SQVSPFKLPIEELEDKVFVNCNTSIYRASSLSNCRHTSSVEE

SEQ ID NO: 759 - protein, 42 aa, Artificial Sequence
  chemically synthesized
SQVSPFKLPIEELEDHVFVNCNTSIYRASSLSNCRHTSSVEE

SEQ ID NO: 760 - protein, 42 aa, Artificial Sequence
  chemically synthesized
  misc_feature (16)..(16): Xaa can be a proteinogenic, non-proteinogenic or synthetic amino acid like ornithin or selenocystein
SQVSPFKLPIEELEDXVFVNCNTSIYRASSLSNCRHTSSVEE

SEQ ID NO: 761 - protein, 42 aa, Artificial Sequence
  chemically synthesized
SQVSPFKLPIEELEDRIFVNCNTSIYRASSLSNCRHTSSVEE

SEQ ID NO: 762 - protein, 42 aa, Artificial Sequence
  chemically synthesized
SQVSPFKLPIEELEDRLFVNCNTSIYRASSLSNCRHTSSVEE

SEQ ID NO: 763 - protein, 42 aa, Artificial Sequence
  chemically synthesized
SQVSPFKLPIEELEDRFFVNCNTSIYRASSLSNCRHTSSVEE

SEQ ID NO: 764 - protein, 42 aa, Artificial Sequence
  chemically synthesized
SQVSPFKLPIEELEDRHFVNCNTSIYRASSLSNCRHTSSVEE

SEQ ID NO: 765 - protein, 42 aa, Artificial Sequence
  chemically synthesized
SQVSPFKLPIEELEDRMFVNCNTSIYRASSLSNCRHTSSVEE

SEQ ID NO: 766 - protein, 42 aa, Artificial Sequence
  chemically synthesized
SQVSPFKLPIEELEDRVIVNCNTSIYRASSLSNCRHTSSVEE

SEQ ID NO: 767 - protein, 42 aa, Artificial Sequence
  chemically synthesized
SQVSPFKLPIEELEDRVLVNCNTSIYRASSLSNCRHTSSVEE

SEQ ID NO: 768 - protein, 42 aa, Artificial Sequence
  chemically synthesized
SQVSPFKLPIEELEDRVVVNCNTSIYRASSLSNCRHTSSVEE

SEQ ID NO: 769 - protein, 42 aa, Artificial Sequence
  chemically synthesized
SQVSPFKLPIEELEDRVHVNCNTSIYRASSLSNCRHTSSVEE

SEQ ID NO: 770 - protein, 42 aa, Artificial Sequence
  chemically synthesized
SQVSPFKLPIEELEDRVMVNCNTSIYRASSLSNCRHTSSVEE

SEQ ID NO: 771 - protein, 42 aa, Artificial Sequence
  chemically synthesized
SQVSPFKLPIEELEDRVFINCNTSIYRASSLSNCRHTSSVEE

SEQ ID NO: 772 - protein, 42 aa, Artificial Sequence
  chemically synthesized
SQVSPFKLPIEELEDRVFLNCNTSIYRASSLSNCRHTSSVEE

SEQ ID NO: 773 - protein, 42 aa, Artificial Sequence
  chemically synthesized
SQVSPFKLPIEELEDRVFFNCNTSIYRASSLSNCRHTSSVEE

SEQ ID NO: 774 - protein, 42 aa, Artificial Sequence
  chemically synthesized
SQVSPFKLPIEELEDRVFHNCNTSIYRASSLSNCRHTSSVEE

SEQ ID NO: 775 - protein, 42 aa, Artificial Sequence
  chemically synthesized
SQVSPFKLPIEELEDRVFMNCNTSIYRASSLSNCRHTSSVEE

SEQ ID NO: 776 - protein, 42 aa, Artificial Sequence
  chemically synthesized
SQVSPFKLPIEELEDRVFVQCNTSIYRASSLSNCRHTSSVEE

SEQ ID NO: 777 - protein, 42 aa, Artificial Sequence
  chemically synthesized
SQVSPFKLPIEELEDRVFVNSNTSIYRASSLSNCRHTSSVEE

SEQ ID NO: 778 - protein, 42 aa, Artificial Sequence
  chemically synthesized
SQVSPFKLPIEELEDRVFVNGNTSIYRASSLSNCRHTSSVEE

SEQ ID NO: 779 - protein, 42 aa, Artificial Sequence
  chemically synthesized
SQVSPFKLPIEELEDRVFVNANTSIYRASSLSNCRHTSSVEE

SEQ ID NO: 780 - protein, 42 aa, Artificial Sequence
  chemically synthesized
SQVSPFKLPIEELEDRVFVNCQTSIYRASSLSNCRHTSSVEE

SEQ ID NO: 781 - protein, 42 aa, Artificial Sequence
  chemically synthesized
SQVSPFKLPIEELEDRVFVNCNSSIYRASSLSNCRHTSSVEE

SEQ ID NO: 782 - protein, 42 aa, Artificial Sequence
  chemically synthesized
SQVSPFKLPIEELEDRVFVNCNYSIYRASSLSNCRHTSSVEE

SEQ ID NO: 783 - protein, 42 aa, Artificial Sequence
  chemically synthesized
SQVSPFKLPIEELEDRVFVNCNTTIYRASSLSNCRHTSSVEE

SEQ ID NO: 784 - protein, 42 aa, Artificial Sequence
  chemically synthesized
SQVSPFKLPIEELEDRVFVNCNTYIYRASSLSNCRHTSSVEE

SEQ ID NO: 785 - protein, 42 aa, Artificial Sequence
  chemically synthesized
SQVSPFKLPIEELEDRVFVNCNTSVYRASSLSNCRHTSSVEE

SEQ ID NO: 786 - protein, 42 aa, Artificial Sequence
  chemically synthesized
SQVSPFKLPIEELEDRVFVNCNTSLYRASSLSNCRHTSSVEE

SEQ ID NO: 787 - protein, 42 aa, Artificial Sequence
  chemically synthesized
SQVSPFKLPIEELEDRVFVNCNTSHYRASSLSNCRHTSSVEE

SEQ ID NO: 788 - protein, 42 aa, Artificial Sequence
  chemically synthesized
SQVSPFKLPIEELEDRVFVNCNTSFYRASSLSNCRHTSSVEE

SEQ ID NO: 789 - protein, 42 aa, Artificial Sequence
  chemically synthesized
SQVSPFKLPIEELEDRVFVNCNTSMYRASSLSNCRHTSSVEE

SEQ ID NO: 790 - protein, 42 aa, Artificial Sequence
  chemically synthesized
SQVSPFKLPIEELEDRVFVNCNTSIWRASSLSNCRHTSSVEE

SEQ ID NO: 791 - protein, 42 aa, Artificial Sequence
  chemically synthesized
SQVSPFKLPIEELEDRVFVNCNTSIFRASSLSNCRHTSSVEE

SEQ ID NO: 792 - protein, 42 aa, Artificial Sequence
  chemically synthesized
SQVSPFKLPIEELEDRVFVNCNTSISRASSLSNCRHTSSVEE

SEQ ID NO: 793 - protein, 42 aa, Artificial Sequence
  chemically synthesized
SQVSPFKLPIEELEDRVFVNCNTSITRASSLSNCRHTSSVEE

SEQ ID NO: 794 - protein, 42 aa, Artificial Sequence
  chemically synthesized
  misc_feature (27)..(27): Xaa can be a proteinogenic, non-proteinogenic or synthetic amino acid like ornithin or selenocystein
SQVSPFKLPIEELEDRVFVNCNTSIYXASSLSNCRHTSSVEE

SEQ ID NO: 795 - protein, 42 aa, Artificial Sequence
  chemically synthesized
SQVSPFKLPIEELEDRVFVNCNTSIYHASSLSNCRHTSSVEE

SEQ ID NO: 796 - protein, 42 aa, Artificial Sequence
  chemically synthesized
SQVSPFKLPIEELEDRVFVNCNTSIYKASSLSNCRHTSSVEE

SEQ ID NO: 797 - protein, 42 aa, Artificial Sequence
  chemically synthesized
SQVSPFKLPIEELEDRVFVNCNTSIYRGSSLSNCRHTSSVEE

SEQ ID NO: 798 - protein, 42 aa, Artificial Sequence
  chemically synthesized
SQVSPFKLPIEELEDRVFVNCNTSIYRATSLSNCRHTSSVEE

SEQ ID NO: 799 - protein, 42 aa, Artificial Sequence
  chemically synthesized
SQVSPFKLPIEELEDRVFVNCNTSIYRAYSLSNCRHTSSVEE

SEQ ID NO: 800 - protein, 42 aa, Artificial Sequence
  chemically synthesized
SQVSPFKLPIEELEDRVFVNCNTSIYRASTLSNCRHTSSVEE

SEQ ID NO: 801 - protein, 42 aa, Artificial Sequence
  chemically synthesized
SQVSPFKLPIEELEDRVFVNCNTSIYRASYLSNCRHTSSVEE

SEQ ID NO: 802 - protein, 42 aa, Artificial Sequence
  chemically synthesized
SQVSPFKLPIEELEDRVFVNCNTSIYRASSISNCRHTSSVEE

SEQ ID NO: 803 - protein, 42 aa, Artificial Sequence
  chemically synthesized
SQVSPFKLPIEELEDRVFVNCNTSIYRASSVSNCRHTSSVEE

SEQ ID NO: 804 - protein, 42 aa, Artificial Sequence
  chemically synthesized
SQVSPFKLPIEELEDRVFVNCNTSIYRASSFSNCRHTSSVEE

SEQ ID NO: 805 - protein, 42 aa, Artificial Sequence
  chemically synthesized
SQVSPFKLPIEELEDRVFVNCNTSIYRASSMSNCRHTSSVEE

SEQ ID NO: 806 - protein, 42 aa, Artificial Sequence
  chemically synthesized
SQVSPFKLPIEELEDRVFVNCNTSIYRASSHSNCRHTSSVEE

SEQ ID NO: 807 - protein, 42 aa, Artificial Sequence
  chemically synthesized
SQVSPFKLPIEELEDRVFVNCNTSIYRASSLTNCRHTSSVEE

SEQ ID NO: 808 - protein, 42 aa, Artificial Sequence
  chemically synthesized
SQVSPFKLPIEELEDRVFVNCNTSIYRASSLYNCRHTSSVEE

SEQ ID NO: 809 - protein, 42 aa, Artificial Sequence
  chemically synthesized
SQVSPFKLPIEELEDRVFVNCNTSIYRASSLSQCRHTSSVEE

SEQ ID NO: 810 - protein, 42 aa, Artificial Sequence
  chemically synthesized
SQVSPFKLPIEELEDRVFVNCNTSIYRASSLSNSRHTSSVEE

SEQ ID NO: 811 - protein, 42 aa, Artificial Sequence
  chemically synthesized
SQVSPFKLPIEELEDRVFVNCNTSIYRASSLSNGRHTSSVEE

SEQ ID NO: 812 - protein, 42 aa, Artificial Sequence
  chemically synthesized
SQVSPFKLPIEELEDRVFVNCNTSIYRASSLSNARHTSSVEE

SEQ ID NO: 813 - protein, 42 aa, Artificial Sequence
  chemically synthesized
  misc_feature (35)..(35): Xaa can be a proteinogenic, non-proteinogenic or synthetic amino acid like ornithin or selenocystein
SQVSPFKLPIEELEDRVFVNCNTSIYRASSLSNCXHTSSVEE

SEQ ID NO: 814 - protein, 42 aa, Artificial Sequence
  chemically synthesized
SQVSPFKLPIEELEDRVFVNCNTSIYRASSLSNCHHTSSVEE

SEQ ID NO: 815 - protein, 42 aa, Artificial Sequence
  chemically synthesized
SQVSPFKLPIEELEDRVFVNCNTSIYRASSLSNCKHTSSVEE

SEQ ID NO: 816 - protein, 42 aa, Artificial Sequence
  chemically synthesized
SQVSPFKLPIEELEDRVFVNCNTSIYRASSLSNCRGTSSVEE

SEQ ID NO: 817 - protein, 42 aa, Artificial Sequence
  chemically synthesized
SQVSPFKLPIEELEDRVFVNCNTSIYRASSLSNCRATSSVEE

SEQ ID NO: 818 - protein, 42 aa, Artificial Sequence
  chemically synthesized
SQVSPFKLPIEELEDRVFVNCNTSIYRASSLSNCRITSSVEE

SEQ ID NO: 819 - protein, 42 aa, Artificial Sequence
  chemically synthesized
SQVSPFKLPIEELEDRVFVNCNTSIYRASSLSNCRLTSSVEE

SEQ ID NO: 820 - protein, 42 aa, Artificial Sequence
  chemically synthesized
SQVSPFKLPIEELEDRVFVNCNTSIYRASSLSNCRMTSSVEE

SEQ ID NO: 821 - protein, 42 aa, Artificial Sequence
  chemically synthesized
SQVSPFKLPIEELEDRVFVNCNTSIYRASSLSNCRVTSSVEE

SEQ ID NO: 822 - protein, 42 aa, Artificial Sequence
  chemically synthesized
SQVSPFKLPIEELEDRVFVNCNTSIYRASSLSNCRHSSSVEE

SEQ ID NO: 823 - protein, 42 aa, Artificial Sequence
  chemically synthesized
SQVSPFKLPIEELEDRVFVNCNTSIYRASSLSNCRHYSSVEE

SEQ ID NO: 824 - protein, 42 aa, Artificial Sequence
  chemically synthesized
SQVSPFKLPIEELEDRVFVNCNTSIYRASSLSNCRHTTSVEE

SEQ ID NO: 825 - protein, 42 aa, Artificial Sequence
  chemically synthesized
SQVSPFKLPIEELEDRVFVNCNTSIYRASSLSNCRHTYSVEE

SEQ ID NO: 826 - protein, 42 aa, Artificial Sequence
  chemically synthesized
SQVSPFKLPIEELEDRVFVNCNTSIYRASSLSNCRHTSTVEE

SEQ ID NO: 827 - protein, 42 aa, Artificial Sequence
  chemically synthesized
SQVSPFKLPIEELEDRVFVNCNTSIYRASSLSNCRHTSYVEE

SEQ ID NO: 828 - protein, 42 aa, Artificial Sequence
  chemically synthesized
SQVSPFKLPIEELEDRVFVNCNTSIYRASSLSNCRHTSSIEE

SEQ ID NO: 829 - protein, 42 aa, Artificial Sequence
  chemically synthesized
SQVSPFKLPIEELEDRVFVNCNTSIYRASSLSNCRHTSSLEE

SEQ ID NO: 830 - protein, 42 aa, Artificial Sequence
  chemically synthesized
SQVSPFKLPIEELEDRVFVNCNTSIYRASSLSNCRHTSSFEE

SEQ ID NO: 831 - protein, 42 aa, Artificial Sequence
  chemically synthesized
SQVSPFKLPIEELEDRVFVNCNTSIYRASSLSNCRHTSSHEE

SEQ ID NO: 832 - protein, 42 aa, Artificial Sequence
  chemically synthesized
SQVSPFKLPIEELEDRVFVNCNTSIYRASSLSNCRHTSSMEE

SEQ ID NO: 833 - protein, 42 aa, Artificial Sequence
  chemically synthesized
SQVSPFKLPIEELEDRVFVNCNTSIYRASSLSNCRHTSSVDE

SEQ ID NO: 834 - protein, 42 aa, Artificial Sequence
  chemically synthesized
  misc_feature (41)..(41): Xaa can be a proteinogenic, non-proteinogenic or synthetic amino acid like ornithin or selenocystein
SQVSPFKLPIEELEDRVFVNCNTSIYRASSLSNCRHTSSVXE

SEQ ID NO: 835 - protein, 42 aa, Artificial Sequence
  chemically synthesized
SQVSPFKLPIEELEDRVFVNCNTSIYRASSLSNCRHTSSVED

SEQ ID NO: 836 - protein, 42 aa, Artificial Sequence
  chemically synthesized
  misc_feature (42)..(42): Xaa can be a proteinogenic, non-proteinogenic or synthetic amino acid like ornithin or selenocystein
SQVSPFKLPIEELEDRVFVNCNTSIYRASSLSNCRHTSSVEX

SEQ ID NO: 837 - protein, 42 aa, Artificial Sequence
  chemically synthesized
SQVSAFKLPIEELEDRVFVNCNTSIYRASSLSNCRHTSSVEE

SEQ ID NO: 838 - protein, 42 aa, Artificial Sequence
  chemically synthesized
SQVSGFKLPIEELEDRVFVNCNTSIYRASSLSNCRHTSSVEE

SEQ ID NO: 839 - protein, 42 aa, Artificial Sequence
  chemically synthesized
SQVSPFKLAIEELEDRVFVNCNTSIYRASSLSNCRHTSSVEE

SEQ ID NO: 840 - protein, 42 aa, Artificial Sequence
  chemically synthesized
SQVSPFKLGIEELEDRVFVNCNTSIYRASSLSNCRHTSSVEE

SEQ ID NO: 841 - protein, 42 aa, Artificial Sequence; identical to SEQ ID NO: 25
  chemically synthesized

SEQ ID NO: 842 - protein, 42 aa, Artificial Sequence; identical to SEQ ID NO: 144
  chemically synthesized

SEQ ID NO: 843 - protein, 42 aa, Artificial Sequence
  chemically synthesized
YQVSPFKIPLEELEDRVFVNCNTSIYRASSLSNCRHTSSVEE

SEQ ID NO: 844 - protein, 42 aa, Artificial Sequence; identical to SEQ ID NO: 264
  chemically synthesized

SEQ ID NO: 845 - protein, 42 aa, Artificial Sequence; identical to SEQ ID NO: 382
  chemically synthesized

SEQ ID NO: 846 - protein, 42 aa, Artificial Sequence
  chemically synthesized
SQISPFKIPLEELEDRVFVNCNTSIYRASSLSNCRHTSSVEE

SEQ ID NO: 847 - protein, 42 aa, Artificial Sequence
  chemically synthesized
SQPSPFKIPLEELEDRVFVNCNTSIYRASSLSNCRHTSSVEE

SEQ ID NO: 848 - protein, 42 aa, Artificial Sequence
  chemically synthesized
SQFSPFKIPLEELEDRVFVNCNTSIYRASSLSNCRHTSSVEE

SEQ ID NO: 849 - protein, 42 aa, Artificial Sequence; identical to SEQ ID NO: 501
  chemically synthesized

SEQ ID NO: 850 - protein, 42 aa, Artificial Sequence
  chemically synthesized
SQVYPFKIPLEELEDRVFVNCNTSIYRASSLSNCRHTSSVEE

SEQ ID NO: 851 - protein, 42 aa, Artificial Sequence
  chemically synthesized
SQVSPWKIPLEELEDRVFVNCNTSIYRASSLSNCRHTSSVEE

SEQ ID NO: 852 - protein, 42 aa, Artificial Sequence
  chemically synthesized
SQVSPYKIPLEELEDRVFVNCNTSIYRASSLSNCRHTSSVEE

SEQ ID NO: 853 - protein, 42 aa, Artificial Sequence
  chemically synthesized
SQVSPHKIPLEELEDRVFVNCNTSIYRASSLSNCRHTSSVEE

SEQ ID NO: 854 - protein, 42 aa, Artificial Sequence
  chemically synthesized
SQVSPFRIPLEELEDRVFVNCNTSIYRASSLSNCRHTSSVEE

SEQ ID NO: 855 - protein, 42 aa, Artificial Sequence
  chemically synthesized
SQVSPFHIPLEELEDRVFVNCNTSIYRASSLSNCRHTSSVEE

SEQ ID NO: 856 - protein, 42 aa, Artificial Sequence
  chemically synthesized
  misc_feature (7)..(7): Xaa can be a proteinogenic, non-proteinogenic or synthetic amino acid like ornithin or selenocystein
SQVSPFXIPLEELEDRVFVNCNTSIYRASSLSNCRHTSSVEE

SEQ ID NO: 857 - protein, 42 aa, Artificial Sequence; identical to SEQ ID NO: 740
  chemically synthesized

SEQ ID NO: 858 - protein, 42 aa, Artificial Sequence
  chemically synthesized
SQVSPFKHPLEELEDRVFVNCNTSIYRASSLSNCRHTSSVEE

SEQ ID NO: 859 - protein, 42 aa, Artificial Sequence
  chemically synthesized
SQVSPFKVPLEELEDRVFVNCNTSIYRASSLSNCRHTSSVEE

SEQ ID NO: 860 - protein, 42 aa, Artificial Sequence
  chemically synthesized
SQVSPFKFPLEELEDRVFVNCNTSIYRASSLSNCRHTSSVEE

SEQ ID NO: 861 - protein, 42 aa, Artificial Sequence
  chemically synthesized
SQVSPFKMPLEELEDRVFVNCNTSIYRASSLSNCRHTSSVEE

SEQ ID NO: 862 - protein, 42 aa, Artificial Sequence; identical to SEQ ID NO: 25
  chemically synthesized

SEQ ID NO: 863 - protein, 42 aa, Artificial Sequence
  chemically synthesized
SQVSPFKIPLDELEDRVFVNCNTSIYRASSLSNCRHTSSVEE

SEQ ID NO: 864 - protein, 42 aa, Artificial Sequence
  chemically synthesized
  misc_feature (11)..(11): Xaa can be a proteinogenic, non-proteinogenic or synthetic amino acid like ornithin or selenocystein
SQVSPFKIPLXELEDRVFVNCNTSIYRASSLSNCRHTSSVEE

SEQ ID NO: 865 - protein, 42 aa, Artificial Sequence
  chemically synthesized
SQVSPFKIPLEDLEDRVFVNCNTSIYRASSLSNCRHTSSVEE

SEQ ID NO: 866 - protein, 42 aa, Artificial Sequence
  chemically synthesized
  misc_feature (12)..(12): Xaa can be a proteinogenic, non-proteinogenic or synthetic amino acid like ornithin or selenocystein
SQVSPFKIPLEXLEDRVFVNCNTSIYRASSLSNCRHTSSVEE

SEQ ID NO: 867 - protein, 42 aa, Artificial Sequence
  chemically synthesized
SQVSPFKIPLEEVEDRVFVNCNTSIYRASSLSNCRHTSSVEE

SEQ ID NO: 868 - protein, 42 aa, Artificial Sequence
  chemically synthesized
SQVSPFKIPLEEIEDRVFVNCNTSIYRASSLSNCRHTSSVEE

SEQ ID NO: 869 - protein, 42 aa, Artificial Sequence
  chemically synthesized
SQVSPFKIPLEEFEDRVFVNCNTSIYRASSLSNCRHTSSVEE

SEQ ID NO: 870 - protein, 42 aa, Artificial Sequence
  chemically synthesized
SQVSPFKIPLEEHEDRVFVNCNTSIYRASSLSNCRHTSSVEE

SEQ ID NO: 871 - protein, 42 aa, Artificial Sequence
  chemically synthesized
SQVSPFKIPLEEMEDRVFVNCNTSIYRASSLSNCRHTSSVEE

SEQ ID NO: 872 - protein, 42 aa, Artificial Sequence
  chemically synthesized
SQVSPFKIPLEELDDRVFVNCNTSIYRASSLSNCRHTSSVEE

SEQ ID NO: 873 - protein, 42 aa, Artificial Sequence
  chemically synthesized
  misc_feature (14)..(14): Xaa can be a proteinogenic, non-proteinogenic or synthetic amino acid like ornithin or selenocystein
SQVSPFKIPLEELXDRVFVNCNTSIYRASSLSNCRHTSSVEE

SEQ ID NO: 874 - protein, 42 aa, Artificial Sequence
  chemically synthesized
  misc_feature (15)..(15): Xaa can be a proteinogenic, non-proteinogenic or synthetic amino acid like ornithin or selenocystein
SQVSPFKIPLEELEXRVFVNCNTSIYRASSLSNCRHTSSVEE

SEQ ID NO: 875 - protein, 42 aa, Artificial Sequence
  chemically synthesized
SQVSPFKIPLEELEERVFVNCNTSIYRASSLSNCRHTSSVEE

SEQ ID NO: 876 - protein, 42 aa, Artificial Sequence
  chemically synthesized
SQVSPFKIPLEELEDKVFVNCNTSIYRASSLSNCRHTSSVEE

SEQ ID NO: 877 - protein, 42 aa, Artificial Sequence
  chemically synthesized
SQVSPFKIPLEELEDHVFVNCNTSIYRASSLSNCRHTSSVEE

SEQ ID NO: 878 - protein, 42 aa, Artificial Sequence
  chemically synthesized
  misc_feature (16)..(16): Xaa can be a proteinogenic, non-proteinogenic or synthetic amino acid like ornithin or selenocystein
SQVSPFKIPLEELEDXVFVNCNTSIYRASSLSNCRHTSSVEE

SEQ ID NO: 879 - protein, 42 aa, Artificial Sequence
  chemically synthesized
SQVSPFKIPLEELEDRIFVNCNTSIYRASSLSNCRHTSSVEE

SEQ ID NO: 880 - protein, 42 aa, Artificial Sequence
  chemically synthesized
SQVSPFKIPLEELEDRLFVNCNTSIYRASSLSNCRHTSSVEE

SEQ ID NO: 881 - protein, 42 aa, Artificial Sequence
  chemically synthesized
SQVSPFKIPLEELEDRFFVNCNTSIYRASSLSNCRHTSSVEE

SEQ ID NO: 882 - protein, 42 aa, Artificial Sequence
  chemically synthesized
SQVSPFKIPLEELEDRHFVNCNTSIYRASSLSNCRHTSSVEE

SEQ ID NO: 883 - protein, 42 aa, Artificial Sequence
  chemically synthesized
SQVSPFKIPLEELEDRMFVNCNTSIYRASSLSNCRHTSSVEE

SEQ ID NO: 884 - protein, 42 aa, Artificial Sequence
  chemically synthesized
SQVSPFKIPLEELEDRVIVNCNTSIYRASSLSNCRHTSSVEE

SEQ ID NO: 885 - protein, 42 aa, Artificial Sequence
  chemically synthesized
SQVSPFKIPLEELEDRVLVNCNTSIYRASSLSNCRHTSSVEE

SEQ ID NO: 886 - protein, 42 aa, Artificial Sequence
  chemically synthesized
SQVSPFKIPLEELEDRVVVNCNTSIYRASSLSNCRHTSSVEE

SEQ ID NO: 887 - protein, 42 aa, Artificial Sequence
  chemically synthesized
SQVSPFKIPLEELEDRVHVNCNTSIYRASSLSNCRHTSSVEE

SEQ ID NO: 888 - protein, 42 aa, Artificial Sequence
  chemically synthesized
SQVSPFKIPLEELEDRVMVNCNTSIYRASSLSNCRHTSSVEE

SEQ ID NO: 889 - protein, 42 aa, Artificial Sequence
  chemically synthesized
SQVSPFKIPLEELEDRVFINCNTSIYRASSLSNCRHTSSVEE

SEQ ID NO: 890 - protein, 42 aa, Artificial Sequence
  chemically synthesized
SQVSPFKIPLEELEDRVFLNCNTSIYRASSLSNCRHTSSVEE

SEQ ID NO: 891 - protein, 42 aa, Artificial Sequence
  chemically synthesized
SQVSPFKIPLEELEDRVFFNCNTSIYRASSLSNCRHTSSVEE

SEQ ID NO: 892 - protein, 42 aa, Artificial Sequence
  chemically synthesized
SQVSPFKIPLEELEDRVFHNCNTSIYRASSLSNCRHTSSVEE

SEQ ID NO: 893 - protein, 42 aa, Artificial Sequence
  chemically synthesized
SQVSPFKIPLEELEDRVFMNCNTSIYRASSLSNCRHTSSVEE

SEQ ID NO: 894 - protein, 42 aa, Artificial Sequence
  chemically synthesized
SQVSPFKIPLEELEDRVFVQCNTSIYRASSLSNCRHTSSVEE

SEQ ID NO: 895 - protein, 42 aa, Artificial Sequence
  chemically synthesized
SQVSPFKIPLEELEDRVFVNSNTSIYRASSLSNCRHTSSVEE

SEQ ID NO: 896 - protein, 42 aa, Artificial Sequence
  chemically synthesized
SQVSPFKIPLEELEDRVFVNGNTSIYRASSLSNCRHTSSVEE

SEQ ID NO: 897 - protein, 42 aa, Artificial Sequence
  chemically synthesized
SQVSPFKIPLEELEDRVFVNANTSIYRASSLSNCRHTSSVEE

SEQ ID NO: 898 - protein, 42 aa, Artificial Sequence
  chemically synthesized
SQVSPFKIPLEELEDRVFVNCQTSIYRASSLSNCRHTSSVEE

SEQ ID NO: 899 - protein, 42 aa, Artificial Sequence
  chemically synthesized
SQVSPFKIPLEELEDRVFVNCNSSIYRASSLSNCRHTSSVEE

SEQ ID NO: 900 - protein, 42 aa, Artificial Sequence
  chemically synthesized
SQVSPFKIPLEELEDRVFVNCNYSIYRASSLSNCRHTSSVEE

SEQ ID NO: 901 - protein, 42 aa, Artificial Sequence
  chemically synthesized
SQVSPFKIPLEELEDRVFVNCNTTIYRASSLSNCRHTSSVEE

SEQ ID NO: 902 - protein, 42 aa, Artificial Sequence
  chemically synthesized
SQVSPFKIPLEELEDRVFVNCNTYIYRASSLSNCRHTSSVEE

SEQ ID NO: 903 - protein, 42 aa, Artificial Sequence
  chemically synthesized
SQVSPFKIPLEELEDRVFVNCNTSVYRASSLSNCRHTSSVEE

SEQ ID NO: 904 - protein, 42 aa, Artificial Sequence
  chemically synthesized
SQVSPFKIPLEELEDRVFVNCNTSLYRASSLSNCRHTSSVEE

SEQ ID NO: 905 - protein, 42 aa, Artificial Sequence
  chemically synthesized
SQVSPFKIPLEELEDRVFVNCNTSHYRASSLSNCRHTSSVEE

SEQ ID NO: 906 - protein, 42 aa, Artificial Sequence
  chemically synthesized
SQVSPFKIPLEELEDRVFVNCNTSFYRASSLSNCRHTSSVEE

SEQ ID NO: 907 - protein, 42 aa, Artificial Sequence
  chemically synthesized
SQVSPFKIPLEELEDRVFVNCNTSMYRASSLSNCRHTSSVEE

SEQ ID NO: 908 - protein, 42 aa, Artificial Sequence
  chemically synthesized
SQVSPFKIPLEELEDRVFVNCNTSIWRASSLSNCRHTSSVEE

SEQ ID NO: 909 - protein, 42 aa, Artificial Sequence
  chemically synthesized
SQVSPFKIPLEELEDRVFVNCNTSIFRASSLSNCRHTSSVEE

SEQ ID NO: 910 - protein, 42 aa, Artificial Sequence
  chemically synthesized
SQVSPFKIPLEELEDRVFVNCNTSISRASSLSNCRHTSSVEE

SEQ ID NO: 911 - protein, 42 aa, Artificial Sequence
  chemically synthesized
SQVSPFKIPLEELEDRVFVNCNTSITRASSLSNCRHTSSVEE

SEQ ID NO: 912 - protein, 42 aa, Artificial Sequence
  chemically synthesized
  misc_feature (27)..(27): Xaa can be a proteinogenic, non-proteinogenic or synthetic amino acid like ornithin or selenocystein
SQVSPFKIPLEELEDRVFVNCNTSIYXASSLSNCRHTSSVEE

SEQ ID NO: 913 - protein, 42 aa, Artificial Sequence
  chemically synthesized
SQVSPFKIPLEELEDRVFVNCNTSIYHASSLSNCRHTSSVEE

SEQ ID NO: 914 - protein, 42 aa, Artificial Sequence
  chemically synthesized
SQVSPFKIPLEELEDRVFVNCNTSIYKASSLSNCRHTSSVEE

SEQ ID NO: 915 - protein, 42 aa, Artificial Sequence
  chemically synthesized
SQVSPFKIPLEELEDRVFVNCNTSIYRGSSLSNCRHTSSVEE

SEQ ID NO: 916 - protein, 42 aa, Artificial Sequence
  chemically synthesized
SQVSPFKIPLEELEDRVFVNCNTSIYRATSLSNCRHTSSVEE

SEQ ID NO: 917 - protein, 42 aa, Artificial Sequence
  chemically synthesized
SQVSPFKIPLEELEDRVFVNCNTSIYRAYSLSNCRHTSSVEE

SEQ ID NO: 918 - protein, 42 aa, Artificial Sequence
  chemically synthesized
SQVSPFKIPLEELEDRVFVNCNTSIYRASTLSNCRHTSSVEE

SEQ ID NO: 919 - protein, 42 aa, Artificial Sequence
  chemically synthesized
SQVSPFKIPLEELEDRVFVNCNTSIYRASYLSNCRHTSSVEE

SEQ ID NO: 920 - protein, 42 aa, Artificial Sequence
  chemically synthesized
SQVSPFKIPLEELEDRVFVNCNTSIYRASSISNCRHTSSVEE

SEQ ID NO: 921 - protein, 42 aa, Artificial Sequence
  chemically synthesized
SQVSPFKIPLEELEDRVFVNCNTSIYRASSVSNCRHTSSVEE

SEQ ID NO: 922 - protein, 42 aa, Artificial Sequence
  chemically synthesized
SQVSPFKIPLEELEDRVFVNCNTSIYRASSFSNCRHTSSVEE

SEQ ID NO: 923 - protein, 42 aa, Artificial Sequence
  chemically synthesized
SQVSPFKIPLEELEDRVFVNCNTSIYRASSMSNCRHTSSVEE

SEQ ID NO: 924 - protein, 42 aa, Artificial Sequence
  chemically synthesized
SQVSPFKIPLEELEDRVFVNCNTSIYRASSHSNCRHTSSVEE

SEQ ID NO: 925 - protein, 42 aa, Artificial Sequence
  chemically synthesized
SQVSPFKIPLEELEDRVFVNCNTSIYRASSLTNCRHTSSVEE

SEQ ID NO: 926 - protein, 42 aa, Artificial Sequence
  chemically synthesized
SQVSPFKIPLEELEDRVFVNCNTSIYRASSLYNCRHTSSVEE

SEQ ID NO: 927 - protein, 42 aa, Artificial Sequence
  chemically synthesized
SQVSPFKIPLEELEDRVFVNCNTSIYRASSLSQCRHTSSVEE

SEQ ID NO: 928 - protein, 42 aa, Artificial Sequence
  chemically synthesized
SQVSPFKIPLEELEDRVFVNCNTSIYRASSLSNSRHTSSVEE

SEQ ID NO: 929 - protein, 42 aa, Artificial Sequence
  chemically synthesized
SQVSPFKIPLEELEDRVFVNCNTSIYRASSLSNGRHTSSVEE

SEQ ID NO: 930 - protein, 42 aa, Artificial Sequence
  chemically synthesized
SQVSPFKIPLEELEDRVFVNCNTSIYRASSLSNARHTSSVEE

SEQ ID NO: 931 - protein, 42 aa, Artificial Sequence
  chemically synthesized
  misc_feature (35)..(35): Xaa can be a proteinogenic, non-proteinogenic or synthetic amino acid like ornithin or selenocystein
SQVSPFKIPLEELEDRVFVNCNTSIYRASSLSNCXHTSSVEE

SEQ ID NO: 932 - protein, 42 aa, Artificial Sequence
  chemically synthesized
SQVSPFKIPLEELEDRVFVNCNTSIYRASSLSNCHHTSSVEE

SEQ ID NO: 933 - protein, 42 aa, Artificial Sequence
  chemically synthesized
SQVSPFKIPLEELEDRVFVNCNTSIYRASSLSNCKHTSSVEE

SEQ ID NO: 934 - protein, 42 aa, Artificial Sequence
  chemically synthesized
SQVSPFKIPLEELEDRVFVNCNTSIYRASSLSNCRGTSSVEE

SEQ ID NO: 935 - protein, 42 aa, Artificial Sequence
  chemically synthesized
SQVSPFKIPLEELEDRVFVNCNTSIYRASSLSNCRATSSVEE

SEQ ID NO: 936 - protein, 42 aa, Artificial Sequence
  chemically synthesized
SQVSPFKIPLEELEDRVFVNCNTSIYRASSLSNCRITSSVEE

SEQ ID NO: 937 - protein, 42 aa, Artificial Sequence
  chemically synthesized
SQVSPFKIPLEELEDRVFVNCNTSIYRASSLSNCRLTSSVEE

SEQ ID NO: 938 - protein, 42 aa, Artificial Sequence
  chemically synthesized
SQVSPFKIPLEELEDRVFVNCNTSIYRASSLSNCRMTSSVEE

SEQ ID NO: 939 - protein, 42 aa, Artificial Sequence
  chemically synthesized
SQVSPFKIPLEELEDRVFVNCNTSIYRASSLSNCRVTSSVEE

SEQ ID NO: 940 - protein, 42 aa, Artificial Sequence
  chemically synthesized
SQVSPFKIPLEELEDRVFVNCNTSIYRASSLSNCRHSSSVEE

SEQ ID NO: 941 - protein, 42 aa, Artificial Sequence
  chemically synthesized
SQVSPFKIPLEELEDRVFVNCNTSIYRASSLSNCRHYSSVEE

SEQ ID NO: 942 - protein, 42 aa, Artificial Sequence
  chemically synthesized
SQVSPFKIPLEELEDRVFVNCNTSIYRASSLSNCRHTTSVEE

SEQ ID NO: 943 - protein, 42 aa, Artificial Sequence
  chemically synthesized
SQVSPFKIPLEELEDRVFVNCNTSIYRASSLSNCRHTYSVEE

SEQ ID NO: 944 - protein, 42 aa, Artificial Sequence
  chemically synthesized
SQVSPFKIPLEELEDRVFVNCNTSIYRASSLSNCRHTSTVEE

SEQ ID NO: 945 - protein, 42 aa, Artificial Sequence
  chemically synthesized
SQVSPFKIPLEELEDRVFVNCNTSIYRASSLSNCRHTSYVEE

SEQ ID NO: 946 - protein, 42 aa, Artificial Sequence
  chemically synthesized
SQVSPFKIPLEELEDRVFVNCNTSIYRASSLSNCRHTSSIEE

SEQ ID NO: 947 - protein, 42 aa, Artificial Sequence
  chemically synthesized
SQVSPFKIPLEELEDRVFVNCNTSIYRASSLSNCRHTSSLEE

SEQ ID NO: 948 - protein, 42 aa, Artificial Sequence
  chemically synthesized
SQVSPFKIPLEELEDRVFVNCNTSIYRASSLSNCRHTSSFEE

SEQ ID NO: 949 - protein, 42 aa, Artificial Sequence
  chemically synthesized
SQVSPFKIPLEELEDRVFVNCNTSIYRASSLSNCRHTSSHEE

SEQ ID NO: 950 - protein, 42 aa, Artificial Sequence
  chemically synthesized
SQVSPFKIPLEELEDRVFVNCNTSIYRASSLSNCRHTSSMEE

SEQ ID NO: 951 - protein, 42 aa, Artificial Sequence
  chemically synthesized
SQVSPFKIPLEELEDRVFVNCNTSIYRASSLSNCRHTSSVDE

SEQ ID NO: 952 - protein, 42 aa, Artificial Sequence
  chemically synthesized
  misc_feature (41)..(41): Xaa can be a proteinogenic, non-proteinogenic or synthetic amino acid like ornithin or selenocystein
SQVSPFKIPLEELEDRVFVNCNTSIYRASSLSNCRHTSSVXE

SEQ ID NO: 953 - protein, 42 aa, Artificial Sequence
  chemically synthesized
SQVSPFKIPLEELEDRVFVNCNTSIYRASSLSNCRHTSSVED

SEQ ID NO: 954 - protein, 42 aa, Artificial Sequence
  chemically synthesized
  misc_feature (42)..(42): Xaa can be a proteinogenic, non-proteinogenic or synthetic amino acid like ornithin or selenocystein
SQVSPFKIPLEELEDRVFVNCNTSIYRASSLSNCRHTSSVEX

SEQ ID NO: 955 - protein, 42 aa, Artificial Sequence
  chemically synthesized
SQVSAFKIPLEELEDRVFVNCNTSIYRASSLSNCRHTSSVEE

SEQ ID NO: 956 - protein, 42 aa, Artificial Sequence
  chemically synthesized
SQVSGFKIPLEELEDRVFVNCNTSIYRASSLSNCRHTSSVEE

SEQ ID NO: 957 - protein, 42 aa, Artificial Sequence
  chemically synthesized
SQVSPFKIALEELEDRVFVNCNTSIYRASSLSNCRHTSSVEE

SEQ ID NO: 958 - protein, 42 aa, Artificial Sequence
  chemically synthesized
SQVSPFKIGLEELEDRVFVNCNTSIYRASSLSNCRHTSSVEE

SEQ ID NO: 959 - protein, 42 aa, Artificial Sequence; identical to SEQ ID NO: 30
  chemically synthesized

SEQ ID NO: 960 - protein, 42 aa, Artificial Sequence; identical to SEQ ID NO: 149
  chemically synthesized

SEQ ID NO: 961 - protein, 42 aa, Artificial Sequence
  chemically synthesized
YQVSPFKIPIDELEDRVFVNCNTSIYRASSLSNCRHTSSVEE

SEQ ID NO: 962 - protein, 42 aa, Artificial Sequence; identical to SEQ ID NO: 269
  chemically synthesized

SEQ ID NO: 963 - protein, 42 aa, Artificial Sequence; identical to SEQ ID NO: 387
  chemically synthesized

SEQ ID NO: 964 - protein, 42 aa, Artificial Sequence
  chemically synthesized
SQISPFKIPIDELEDRVFVNCNTSIYRASSLSNCRHTSSVEE

SEQ ID NO: 965 - protein, 42 aa, Artificial Sequence
  chemically synthesized
SQPSPFKIPIDELEDRVFVNCNTSIYRASSLSNCRHTSSVEE

SEQ ID NO: 966 - protein, 42 aa, Artificial Sequence
  chemically synthesized
SQFSPFKIPIDELEDRVFVNCNTSIYRASSLSNCRHTSSVEE

SEQ ID NO: 967 - protein, 42 aa, Artificial Sequence; identical to SEQ ID NO: 506
  chemically synthesized

SEQ ID NO: 968 - protein, 42 aa, Artificial Sequence
  chemically synthesized
SQVYPFKIPIDELEDRVFVNCNTSIYRASSLSNCRHTSSVEE

SEQ ID NO: 969 - protein, 42 aa, Artificial Sequence
  chemically synthesized
SQVSPWKIPIDELEDRVFVNCNTSIYRASSLSNCRHTSSVEE

SEQ ID NO: 970 - protein, 42 aa, Artificial Sequence
  chemically synthesized
SQVSPYKIPIDELEDRVFVNCNTSIYRASSLSNCRHTSSVEE

SEQ ID NO: 971 - protein, 42 aa, Artificial Sequence
  chemically synthesized
SQVSPHKIPIDELEDRVFVNCNTSIYRASSLSNCRHTSSVEE

SEQ ID NO: 972 - protein, 42 aa, Artificial Sequence
  chemically synthesized
SQVSPFRIPIDELEDRVFVNCNTSIYRASSLSNCRHTSSVEE

SEQ ID NO: 973 - protein, 42 aa, Artificial Sequence
  chemically synthesized
SQVSPFHIPIDELEDRVFVNCNTSIYRASSLSNCRHTSSVEE

SEQ ID NO: 974 - protein, 42 aa, Artificial Sequence
  chemically synthesized
  misc_feature (7)..(7): Xaa can be a proteinogenic, non-proteinogenic or synthetic amino acid like ornithin or selenocystein
SQVSPFXIPIDELEDRVFVNCNTSIYRASSLSNCRHTSSVEE

SEQ ID NO: 975 - protein, 42 aa, Artificial Sequence; identical to SEQ ID NO: 745
  chemically synthesized

SEQ ID NO: 976 - protein, 42 aa, Artificial Sequence
  chemically synthesized
SQVSPFKHPIDELEDRVFVNCNTSIYRASSLSNCRHTSSVEE

SEQ ID NO: 977 - protein, 42 aa, Artificial Sequence
  chemically synthesized
SQVSPFKVPIDELEDRVFVNCNTSIYRASSLSNCRHTSSVEE

SEQ ID NO: 978 - protein, 42 aa, Artificial Sequence
  chemically synthesized
SQVSPFKFPIDELEDRVFVNCNTSIYRASSLSNCRHTSSVEE

SEQ ID NO: 979 - protein, 42 aa, Artificial Sequence
  chemically synthesized
SQVSPFKMPIDELEDRVFVNCNTSIYRASSLSNCRHTSSVEE

SEQ ID NO: 980 - protein, 42 aa, Artificial Sequence; identical to SEQ ID NO: 863
  chemically synthesized

SEQ ID NO: 981 - protein, 42 aa, Artificial Sequence
  chemically synthesized
SQVSPFKIPHDELEDRVFVNCNTSIYRASSLSNCRHTSSVEE

SEQ ID NO: 982 - protein, 42 aa, Artificial Sequence
  chemically synthesized
SQVSPFKIPVDELEDRVFVNCNTSIYRASSLSNCRHTSSVEE

SEQ ID NO: 983 - protein, 42 aa, Artificial Sequence
  chemically synthesized
SQVSPFKIPFDELEDRVFVNCNTSIYRASSLSNCRHTSSVEE

SEQ ID NO: 984 - protein, 42 aa, Artificial Sequence
  chemically synthesized
SQVSPFKIPMDELEDRVFVNCNTSIYRASSLSNCRHTSSVEE

SEQ ID NO: 985 - protein, 42 aa, Artificial Sequence
  chemically synthesized
SQVSPFKIPIDDLEDRVFVNCNTSIYRASSLSNCRHTSSVEE

SEQ ID NO: 986 - protein, 42 aa, Artificial Sequence
  chemically synthesized
  misc_feature (12)..(12): Xaa can be a proteinogenic, non-proteinogenic or synthetic amino acid like ornithin or selenocystein
SQVSPFKIPIDXLEDRVFVNCNTSIYRASSLSNCRHTSSVEE

SEQ ID NO: 987 - protein, 42 aa, Artificial Sequence
  chemically synthesized
SQVSPFKIPIDEVEDRVFVNCNTSIYRASSLSNCRHTSSVEE

SEQ ID NO: 988 - protein, 42 aa, Artificial Sequence
  chemically synthesized
SQVSPFKIPIDEIEDRVFVNCNTSIYRASSLSNCRHTSSVEE

SEQ ID NO: 989 - protein, 42 aa, Artificial Sequence
  chemically synthesized
SQVSPFKIPIDEFEDRVFVNCNTSIYRASSLSNCRHTSSVEE

SEQ ID NO: 990 - protein, 42 aa, Artificial Sequence
  chemically synthesized
SQVSPFKIPIDEHEDRVFVNCNTSIYRASSLSNCRHTSSVEE

SEQ ID NO: 991 - protein, 42 aa, Artificial Sequence
  chemically synthesized
SQVSPFKIPIDEMEDRVFVNCNTSIYRASSLSNCRHTSSVEE

SEQ ID NO: 992 - protein, 42 aa, Artificial Sequence
  chemically synthesized
SQVSPFKIPIDELDDRVFVNCNTSIYRASSLSNCRHTSSVEE

SEQ ID NO: 993 - protein, 42 aa, Artificial Sequence
  chemically synthesized
  misc_feature (14)..(14): Xaa can be a proteinogenic, non-proteinogenic or synthetic amino acid like ornithin or selenocystein
SQVSPFKIPIDELXDRVFVNCNTSIYRASSLSNCRHTSSVEE

SEQ ID NO: 994 - protein, 42 aa, Artificial Sequence
  chemically synthesized
  misc_feature (15)..(15): Xaa can be a proteinogenic, non-proteinogenic or synthetic amino acid like ornithin or selenocystein
SQVSPFKIPIDELEXRVFVNCNTSIYRASSLSNCRHTSSVEE

SEQ ID NO: 995 - protein, 42 aa, Artificial Sequence
  chemically synthesized
SQVSPFKIPIDELEERVFVNCNTSIYRASSLSNCRHTSSVEE

SEQ ID NO: 996 - protein, 42 aa, Artificial Sequence
  chemically synthesized
SQVSPFKIPIDELEDKVFVNCNTSIYRASSLSNCRHTSSVEE

SEQ ID NO: 997 - protein, 42 aa, Artificial Sequence
  chemically synthesized
SQVSPFKIPIDELEDHVFVNCNTSIYRASSLSNCRHTSSVEE

SEQ ID NO: 998 - protein, 42 aa, Artificial Sequence
  chemically synthesized
  misc_feature (16)..(16): Xaa can be a proteinogenic, non-proteinogenic or synthetic amino acid like ornithin or selenocystein
SQVSPFKIPIDELEDXVFVNCNTSIYRASSLSNCRHTSSVEE

SEQ ID NO: 999 - protein, 42 aa, Artificial Sequence
  chemically synthesized
SQVSPFKIPIDELEDRIFVNCNTSIYRASSLSNCRHTSSVEE

SEQ ID NO: 1000 - protein, 42 aa, Artificial Sequence
  chemically synthesized
SQVSPFKIPIDELEDRLFVNCNTSIYRASSLSNCRHTSSVEE

SEQ ID NO: 1001 - protein, 42 aa, Artificial Sequence
  chemically synthesized
SQVSPFKIPIDELEDRFFVNCNTSIYRASSLSNCRHTSSVEE

SEQ ID NO: 1002 - protein, 42 aa, Artificial Sequence
  chemically synthesized
SQVSPFKIPIDELEDRHFVNCNTSIYRASSLSNCRHTSSVEE

SEQ ID NO: 1003 - protein, 42 aa, Artificial Sequence
  chemically synthesized
SQVSPFKIPIDELEDRMFVNCNTSIYRASSLSNCRHTSSVEE

SEQ ID NO: 1004 - protein, 42 aa, Artificial Sequence
  chemically synthesized
SQVSPFKIPIDELEDRVIVNCNTSIYRASSLSNCRHTSSVEE

SEQ ID NO: 1005 - protein, 42 aa, Artificial Sequence
  chemically synthesized
SQVSPFKIPIDELEDRVLVNCNTSIYRASSLSNCRHTSSVEE

SEQ ID NO: 1006 - protein, 42 aa, Artificial Sequence
  chemically synthesized
SQVSPFKIPIDELEDRVVVNCNTSIYRASSLSNCRHTSSVEE

SEQ ID NO: 1007 - protein, 42 aa, Artificial Sequence
  chemically synthesized
SQVSPFKIPIDELEDRVHVNCNTSIYRASSLSNCRHTSSVEE

SEQ ID NO: 1008 - protein, 42 aa, Artificial Sequence
  chemically synthesized
SQVSPFKIPIDELEDRVMVNCNTSIYRASSLSNCRHTSSVEE

SEQ ID NO: 1009 - protein, 42 aa, Artificial Sequence
  chemically synthesized
SQVSPFKIPIDELEDRVFINCNTSIYRASSLSNCRHTSSVEE

SEQ ID NO: 1010 - protein, 42 aa, Artificial Sequence
  chemically synthesized
SQVSPFKIPIDELEDRVFLNCNTSIYRASSLSNCRHTSSVEE

SEQ ID NO: 1011 - protein, 42 aa, Artificial Sequence
  chemically synthesized
SQVSPFKIPIDELEDRVFFNCNTSIYRASSLSNCRHTSSVEE

SEQ ID NO: 1012 - protein, 42 aa, Artificial Sequence
  chemically synthesized
SQVSPFKIPIDELEDRVFHNCNTSIYRASSLSNCRHTSSVEE

SEQ ID NO: 1013 - protein, 42 aa, Artificial Sequence
  chemically synthesized
SQVSPFKIPIDELEDRVFMNCNTSIYRASSLSNCRHTSSVEE

SEQ ID NO: 1014 - protein, 42 aa, Artificial Sequence
  chemically synthesized
SQVSPFKIPIDELEDRVFVQCNTSIYRASSLSNCRHTSSVEE

SEQ ID NO: 1015 - protein, 42 aa, Artificial Sequence
  chemically synthesized
SQVSPFKIPIDELEDRVFVNSNTSIYRASSLSNCRHTSSVEE

SEQ ID NO: 1016 - protein, 42 aa, Artificial Sequence
  chemically synthesized
SQVSPFKIPIDELEDRVFVNGNTSIYRASSLSNCRHTSSVEE

SEQ ID NO: 1017 - protein, 42 aa, Artificial Sequence
  chemically synthesized
SQVSPFKIPIDELEDRVFVNANTSIYRASSLSNCRHTSSVEE

SEQ ID NO: 1018 - protein, 42 aa, Artificial Sequence
  chemically synthesized
SQVSPFKIPIDELEDRVFVNCQTSIYRASSLSNCRHTSSVEE

SEQ ID NO: 1019 - protein, 42 aa, Artificial Sequence
  chemically synthesized
SQVSPFKIPIDELEDRVFVNCNSSIYRASSLSNCRHTSSVEE

SEQ ID NO: 1020 - protein, 42 aa, Artificial Sequence
  chemically synthesized
SQVSPFKIPIDELEDRVFVNCNYSIYRASSLSNCRHTSSVEE

SEQ ID NO: 1021 - protein, 42 aa, Artificial Sequence
  chemically synthesized
SQVSPFKIPIDELEDRVFVNCNTTIYRASSLSNCRHTSSVEE

SEQ ID NO: 1022 - protein, 42 aa, Artificial Sequence
  chemically synthesized
SQVSPFKIPIDELEDRVFVNCNTYIYRASSLSNCRHTSSVEE

SEQ ID NO: 1023 - protein, 42 aa, Artificial Sequence
  chemically synthesized
SQVSPFKIPIDELEDRVFVNCNTSVYRASSLSNCRHTSSVEE

SEQ ID NO: 1024 - protein, 42 aa, Artificial Sequence
  chemically synthesized
SQVSPFKIPIDELEDRVFVNCNTSLYRASSLSNCRHTSSVEE

SEQ ID NO: 1025 - protein, 42 aa, Artificial Sequence
  chemically synthesized
SQVSPFKIPIDELEDRVFVNCNTSHYRASSLSNCRHTSSVEE

SEQ ID NO: 1026 - protein, 42 aa, Artificial Sequence
  chemically synthesized
SQVSPFKIPIDELEDRVFVNCNTSFYRASSLSNCRHTSSVEE

SEQ ID NO: 1027 - protein, 42 aa, Artificial Sequence
  chemically synthesized
SQVSPFKIPIDELEDRVFVNCNTSMYRASSLSNCRHTSSVEE

SEQ ID NO: 1028 - protein, 42 aa, Artificial Sequence
  chemically synthesized
SQVSPFKIPIDELEDRVFVNCNTSIWRASSLSNCRHTSSVEE

SEQ ID NO: 1029 - protein, 42 aa, Artificial Sequence
  chemically synthesized
SQVSPFKIPIDELEDRVFVNCNTSIFRASSLSNCRHTSSVEE

SEQ ID NO: 1030 - protein, 42 aa, Artificial Sequence
  chemically synthesized
SQVSPFKIPIDELEDRVFVNCNTSISRASSLSNCRHTSSVEE

SEQ ID NO: 1031 - protein, 42 aa, Artificial Sequence
  chemically synthesized
SQVSPFKIPIDELEDRVFVNCNTSITRASSLSNCRHTSSVEE

SEQ ID NO: 1032 - protein, 42 aa, Artificial Sequence
  chemically synthesized
  misc_feature (27)..(27): Xaa can be a proteinogenic, non-proteinogenic or synthetic amino acid like ornithin or selenocystein
SQVSPFKIPIDELEDRVFVNCNTSIYXASSLSNCRHTSSVEE

SEQ ID NO: 1033 - protein, 42 aa, Artificial Sequence
  chemically synthesized
SQVSPFKIPIDELEDRVFVNCNTSIYHASSLSNCRHTSSVEE

SEQ ID NO: 1034 - protein, 42 aa, Artificial Sequence
  chemically synthesized
SQVSPFKIPIDELEDRVFVNCNTSIYKASSLSNCRHTSSVEE

SEQ ID NO: 1035 - protein, 42 aa, Artificial Sequence
  chemically synthesized
SQVSPFKIPIDELEDRVFVNCNTSIYRGSSLSNCRHTSSVEE

SEQ ID NO: 1036 - protein, 42 aa, Artificial Sequence
  chemically synthesized
SQVSPFKIPIDELEDRVFVNCNTSIYRATSLSNCRHTSSVEE

SEQ ID NO: 1037 - protein, 42 aa, Artificial Sequence
  chemically synthesized
SQVSPFKIPIDELEDRVFVNCNTSIYRAYSLSNCRHTSSVEE

SEQ ID NO: 1038 - protein, 42 aa, Artificial Sequence
  chemically synthesized
SQVSPFKIPIDELEDRVFVNCNTSIYRASTLSNCRHTSSVEE

SEQ ID NO: 1039 - protein, 42 aa, Artificial Sequence
  chemically synthesized
SQVSPFKIPIDELEDRVFVNCNTSIYRASYLSNCRHTSSVEE

SEQ ID NO: 1040 - protein, 42 aa, Artificial Sequence
  chemically synthesized
SQVSPFKIPIDELEDRVFVNCNTSIYRASSISNCRHTSSVEE

SEQ ID NO: 1041 - protein, 42 aa, Artificial Sequence
  chemically synthesized
SQVSPFKIPIDELEDRVFVNCNTSIYRASSVSNCRHTSSVEE

SEQ ID NO: 1042 - protein, 42 aa, Artificial Sequence
  chemically synthesized
SQVSPFKIPIDELEDRVFVNCNTSIYRASSFSNCRHTSSVEE

SEQ ID NO: 1043 - protein, 42 aa, Artificial Sequence
  chemically synthesized
SQVSPFKIPIDELEDRVFVNCNTSIYRASSMSNCRHTSSVEE

SEQ ID NO: 1044 - protein, 42 aa, Artificial Sequence
  chemically synthesized
SQVSPFKIPIDELEDRVFVNCNTSIYRASSHSNCRHTSSVEE

SEQ ID NO: 1045 - protein, 42 aa, Artificial Sequence
  chemically synthesized
SQVSPFKIPIDELEDRVFVNCNTSIYRASSLTNCRHTSSVEE

SEQ ID NO: 1046 - protein, 42 aa, Artificial Sequence
  chemically synthesized
SQVSPFKIPIDELEDRVFVNCNTSIYRASSLYNCRHTSSVEE

SEQ ID NO: 1047 - protein, 42 aa, Artificial Sequence
  chemically synthesized
SQVSPFKIPIDELEDRVFVNCNTSIYRASSLSQCRHTSSVEE

SEQ ID NO: 1048 - protein, 42 aa, Artificial Sequence
  chemically synthesized
SQVSPFKIPIDELEDRVFVNCNTSIYRASSLSNSRHTSSVEE

SEQ ID NO: 1049 - protein, 42 aa, Artificial Sequence
  chemically synthesized
SQVSPFKIPIDELEDRVFVNCNTSIYRASSLSNGRHTSSVEE

SEQ ID NO: 1050 - protein, 42 aa, Artificial Sequence
  chemically synthesized
SQVSPFKIPIDELEDRVFVNCNTSIYRASSLSNARHTSSVEE

SEQ ID NO: 1051 - protein, 42 aa, Artificial Sequence
  chemically synthesized
  misc_feature (35)..(35): Xaa can be a proteinogenic, non-proteinogenic or synthetic amino acid like ornithin or selenocystein
SQVSPFKIPIDELEDRVFVNCNTSIYRASSLSNCXHTSSVEE

SEQ ID NO: 1052 - protein, 42 aa, Artificial Sequence
  chemically synthesized
SQVSPFKIPIDELEDRVFVNCNTSIYRASSLSNCHHTSSVEE

SEQ ID NO: 1053 - protein, 42 aa, Artificial Sequence
  chemically synthesized
SQVSPFKIPIDELEDRVFVNCNTSIYRASSLSNCKHTSSVEE

SEQ ID NO: 1054 - protein, 42 aa, Artificial Sequence
  chemically synthesized
SQVSPFKIPIDELEDRVFVNCNTSIYRASSLSNCRGTSSVEE

SEQ ID NO: 1055 - protein, 42 aa, Artificial Sequence
  chemically synthesized
SQVSPFKIPIDELEDRVFVNCNTSIYRASSLSNCRATSSVEE

SEQ ID NO: 1056 - protein, 42 aa, Artificial Sequence
  chemically synthesized
SQVSPFKIPIDELEDRVFVNCNTSIYRASSLSNCRITSSVEE

SEQ ID NO: 1057 - protein, 42 aa, Artificial Sequence
  chemically synthesized
SQVSPFKIPIDELEDRVFVNCNTSIYRASSLSNCRLTSSVEE

SEQ ID NO: 1058 - protein, 42 aa, Artificial Sequence
  chemically synthesized
SQVSPFKIPIDELEDRVFVNCNTSIYRASSLSNCRMTSSVEE

SEQ ID NO: 1059 - protein, 42 aa, Artificial Sequence
  chemically synthesized
SQVSPFKIPIDELEDRVFVNCNTSIYRASSLSNCRVTSSVEE

SEQ ID NO: 1060 - protein, 42 aa, Artificial Sequence
  chemically synthesized
SQVSPFKIPIDELEDRVFVNCNTSIYRASSLSNCRHSSSVEE

SEQ ID NO: 1061 - protein, 42 aa, Artificial Sequence
  chemically synthesized
SQVSPFKIPIDELEDRVFVNCNTSIYRASSLSNCRHYSSVEE

SEQ ID NO: 1062 - protein, 42 aa, Artificial Sequence
  chemically synthesized
SQVSPFKIPIDELEDRVFVNCNTSIYRASSLSNCRHTTSVEE

SEQ ID NO: 1063 - protein, 42 aa, Artificial Sequence
  chemically synthesized
SQVSPFKIPIDELEDRVFVNCNTSIYRASSLSNCRHTYSVEE

SEQ ID NO: 1064 - protein, 42 aa, Artificial Sequence
  chemically synthesized
SQVSPFKIPIDELEDRVFVNCNTSIYRASSLSNCRHTSTVEE

SEQ ID NO: 1065 - protein, 42 aa, Artificial Sequence
  chemically synthesized
SQVSPFKIPIDELEDRVFVNCNTSIYRASSLSNCRHTSYVEE

SEQ ID NO: 1066 - protein, 42 aa, Artificial Sequence
  chemically synthesized
SQVSPFKIPIDELEDRVFVNCNTSIYRASSLSNCRHTSSIDE

SEQ ID NO: 1067 - protein, 42 aa, Artificial Sequence
  chemically synthesized
SQVSPFKIPIDELEDRVFVNCNTSIYRASSLSNCRHTSSLEE

SEQ ID NO: 1068 - protein, 42 aa, Artificial Sequence
  chemically synthesized
SQVSPFKIPIDELEDRVFVNCNTSIYRASSLSNCRHTSSFEE

SEQ ID NO: 1069 - protein, 42 aa, Artificial Sequence
  chemically synthesized
SQVSPFKIPIDELEDRVFVNCNTSIYRASSLSNCRHTSSHEE

SEQ ID NO: 1070 - protein, 42 aa, Artificial Sequence
  chemically synthesized
SQVSPFKIPIDELEDRVFVNCNTSIYRASSLSNCRHTSSMEE

SEQ ID NO: 1071 - protein, 42 aa, Artificial Sequence; identical to SEQ ID NO: 30
  chemically synthesized

SEQ ID NO: 1072 - protein, 42 aa, Artificial Sequence; identical to SEQ ID NO: 30
  chemically synthesized

SEQ ID NO: 1073 - protein, 42 aa, Artificial Sequence
  chemically synthesized
SQVSPFKIPIDELEDRVFVNCNTSIYRASSLSNCRHTSSVED

SEQ ID NO: 1074 - protein, 42 aa, Artificial Sequence
  chemically synthesized
  misc_feature (42)..(42): Xaa can be a proteinogenic, non-proteinogenic or synthetic amino acid like ornithin or selenocystein
SQVSPFKIPIDELEDRVFVNCNTSIYRASSLSNCRHTSSVEX

SEQ ID NO: 1075 - protein, 42 aa, Artificial Sequence
  chemically synthesized
SQVSAFKIPIDELEDRVFVNCNTSIYRASSLSNCRHTSSVEE

SEQ ID NO: 1076 - protein, 42 aa, Artificial Sequence
  chemically synthesized
SQVSGFKIPIDELEDRVFVNCNTSIYRASSLSNCRHTSSVEE

SEQ ID NO: 1077 - protein, 42 aa, Artificial Sequence
  chemically synthesized
SQVSPFKIAIDELEDRVFVNCNTSIYRASSLSNCRHTSSVEE

SEQ ID NO: 1078 - protein, 42 aa, Artificial Sequence
  chemically synthesized
SQVSPFKIGIDELEDRVFVNCNTSIYRASSLSNCRHTSSVEE

SEQ ID NO: 1079 - protein, 42 aa, Artificial Sequence; identical to SEQ ID NO: 32
  chemically synthesized

SEQ ID NO: 1080 - protein, 42 aa, Artificial Sequence; identical to SEQ ID NO: 151
  chemically synthesized

SEQ ID NO: 1081 - protein, 42 aa, Artificial Sequence
  chemically synthesized
YQVSPFKIPIEDLEDRVFVNCNTSIYRASSLSNCRHTSSVEE

SEQ ID NO: 1082 - protein, 42 aa, Artificial Sequence; identical to SEQ ID NO: 271
  chemically synthesized

SEQ ID NO: 1083 - protein, 42 aa, Artificial Sequence; identical to SEQ ID NO: 389
  chemically synthesized

SEQ ID NO: 1084 - protein, 42 aa, Artificial Sequence
  chemically synthesized
SQISPFKIPIEDLEDRVFVNCNTSIYRASSLSNCRHTSSVEE

SEQ ID NO: 1085 - protein, 42 aa, Artificial Sequence
  chemically synthesized
SQPSPFKIPIEDLEDRVFVNCNTSIYRASSLSNCRHTSSVEE

SEQ ID NO: 1086 - protein, 42 aa, Artificial Sequence
  chemically synthesized
SQFSPFKIPIEDLEDRVFVNCNTSIYRASSLSNCRHTSSVEE

SEQ ID NO: 1087 - protein, 42 aa, Artificial Sequence; identical to SEQ ID NO: 508
  chemically synthesized

SEQ ID NO: 1088 - protein, 42 aa, Artificial Sequence
  chemically synthesized
SQVYPFKIPIEDLEDRVFVNCNTSIYRASSLSNCRHTSSVEE

SEQ ID NO: 1089 - protein, 42 aa, Artificial Sequence
  chemically synthesized
SQVSPWKIPIEDLEDRVFVNCNTSIYRASSLSNCRHTSSVEE

SEQ ID NO: 1090 - protein, 42 aa, Artificial Sequence
  chemically synthesized
SQVSPYKIPIEDLEDRVFVNCNTSIYRASSLSNCRHTSSVEE

SEQ ID NO: 1091 - protein, 42 aa, Artificial Sequence
  chemically synthesized
SQVSPHKIPIEDLEDRVFVNCNTSIYRASSLSNCRHTSSVEE

SEQ ID NO: 1092 - protein, 42 aa, Artificial Sequence
  chemically synthesized
SQVSPFRIPIEDLEDRVFVNCNTSIYRASSLSNCRHTSSVEE

SEQ ID NO: 1093 - protein, 42 aa, Artificial Sequence
  chemically synthesized
SQVSPFHIPIEDLEDRVFVNCNTSIYRASSLSNCRHTSSVEE

SEQ ID NO: 1094 - protein, 42 aa, Artificial Sequence
  chemically synthesized
  misc_feature (7)..(7): Xaa can be a proteinogenic, non-proteinogenic or synthetic amino acid like ornithin or selenocystein
SQVSPFXIPIEDLEDRVFVNCNTSIYRASSLSNCRHTSSVEE

SEQ ID NO: 1095 - protein, 42 aa, Artificial Sequence; identical to SEQ ID NO: 747
  chemically synthesized

SEQ ID NO: 1096 - protein, 42 aa, Artificial Sequence
  chemically synthesized
SQVSPFKHPIEDLEDRVFVNCNTSIYRASSLSNCRHTSSVEE

SEQ ID NO: 1097 - protein, 42 aa, Artificial Sequence
  chemically synthesized
SQVSPFKVPIEDLEDRVFVNCNTSIYRASSLSNCRHTSSVEE

SEQ ID NO: 1098 - protein, 42 aa, Artificial Sequence
  chemically synthesized
SQVSPFKFPIEDLEDRVFVNCNTSIYRASSLSNCRHTSSVEE

SEQ ID NO: 1099 - protein, 42 aa, Artificial Sequence
  chemically synthesized
SQVSPFKMPIEDLEDRVFVNCNTSIYRASSLSNCRHTSSVEE

SEQ ID NO: 1100 - protein, 42 aa, Artificial Sequence; identical to SEQ ID NO: 865
  chemically synthesized

SEQ ID NO: 1101 - protein, 42 aa, Artificial Sequence
  chemically synthesized
SQVSPFKIPHEDLEDRVFVNCNTSIYRASSLSNCRHTSSVEE

SEQ ID NO: 1102 - protein, 42 aa, Artificial Sequence
  chemically synthesized
SQVSPFKIPVEDLEDRVFVNCNTSIYRASSLSNCRHTSSVEE

SEQ ID NO: 1103 - protein, 42 aa, Artificial Sequence
  chemically synthesized
SQVSPFKIPFEDLEDRVFVNCNTSIYRASSLSNCRHTSSVEE

SEQ ID NO: 1104 - protein, 42 aa, Artificial Sequence
  chemically synthesized
SQVSPFKIPMEDLEDRVFVNCNTSIYRASSLSNCRHTSSVEE

SEQ ID NO: 1105 - protein, 42 aa, Artificial Sequence; identical to SEQ ID NO: 985
  chemically synthesized

SEQ ID NO: 1106 - protein, 42 aa, Artificial Sequence
  chemically synthesized
  misc_feature (11)..(11): Xaa can be a proteinogenic, non-proteinogenic or synthetic amino acid like ornithin or selenocystein
SQVSPFKIPIXDLEDRVFVNCNTSIYRASSLSNCRHTSSVEE

SEQ ID NO: 1107 - protein, 42 aa, Artificial Sequence
  chemically synthesized
SQVSPFKIPIEDVEDRVFVNCNTSIYRASSLSNCRHTSSVEE

SEQ ID NO: 1108 - protein, 42 aa, Artificial Sequence
  chemically synthesized
SQVSPFKIPIEDIEDRVFVNCNTSIYRASSLSNCRHTSSVEE

SEQ ID NO: 1109 - protein, 42 aa, Artificial Sequence
  chemically synthesized
SQVSPFKIPIEDFEDRVFVNCNTSIYRASSLSNCRHTSSVEE

SEQ ID NO: 1110 - protein, 42 aa, Artificial Sequence
  chemically synthesized
SQVSPFKIPIEDHEDRVFVNCNTSIYRASSLSNCRHTSSVEE

SEQ ID NO: 1111 - protein, 42 aa, Artificial Sequence
  chemically synthesized
SQVSPFKIPIEDMEDRVFVNCNTSIYRASSLSNCRHTSSVEE

SEQ ID NO: 1112 - protein, 42 aa, Artificial Sequence
  chemically synthesized
SQVSPFKIPIEDLDDRVFVNCNTSIYRASSLSNCRHTSSVEE

SEQ ID NO: 1113 - protein, 42 aa, Artificial Sequence
  chemically synthesized
  misc_feature (14)..(14): Xaa can be a proteinogenic, non-proteinogenic or synthetic amino acid like ornithin or selenocystein
SQVSPFKIPIEDLXDRVFVNCNTSIYRASSLSNCRHTSSVEE

SEQ ID NO: 1114 - protein, 42 aa, Artificial Sequence
  chemically synthesized
  misc_feature (15)..(15): Xaa can be a proteinogenic, non-proteinogenic or synthetic amino acid like ornithin or selenocystein
SQVSPFKIPIEDLEXRVFVNCNTSIYRASSLSNCRHTSSVEE

SEQ ID NO: 1115 - protein, 42 aa, Artificial Sequence
  chemically synthesized
SQVSPFKIPIEDLEERVFVNCNTSIYRASSLSNCRHTSSVEE

SEQ ID NO: 1116 - protein, 42 aa, Artificial Sequence
  chemically synthesized
SQVSPFKIPIEDLEDKVFVNCNTSIYRASSLSNCRHTSSVEE

SEQ ID NO: 1117 - protein, 42 aa, Artificial Sequence
  chemically synthesized
SQVSPFKIPIEDLEDHVFVNCNTSIYRASSLSNCRHTSSVEE

SEQ ID NO: 1118 - protein, 42 aa, Artificial Sequence
  chemically synthesized
  misc_feature (16)..(16): Xaa can be a proteinogenic, non-proteinogenic or synthetic amino acid like ornithin or selenocystein
SQVSPFKIPIEDLEDXVFVNCNTSIYRASSLSNCRHTSSVEE

SEQ ID NO: 1119 - protein, 42 aa, Artificial Sequence
  chemically synthesized
SQVSPFKIPIEDLEDRIFVNCNTSIYRASSLSNCRHTSSVEE

SEQ ID NO: 1120 - protein, 42 aa, Artificial Sequence
  chemically synthesized
SQVSPFKIPIEDLEDRLFVNCNTSIYRASSLSNCRHTSSVEE

SEQ ID NO: 1121 - protein, 42 aa, Artificial Sequence
  chemically synthesized
SQVSPFKIPIEDLEDRFFVNCNTSIYRASSLSNCRHTSSVEE

SEQ ID NO: 1122 - protein, 42 aa, Artificial Sequence
  chemically synthesized
SQVSPFKIPIEDLEDRHFVNCNTSIYRASSLSNCRHTSSVEE

SEQ ID NO: 1123 - protein, 42 aa, Artificial Sequence
  chemically synthesized
SQVSPFKIPIEDLEDRMFVNCNTSIYRASSLSNCRHTSSVEE

SEQ ID NO: 1124 - protein, 42 aa, Artificial Sequence
  chemically synthesized
SQVSPFKIPIEDLEDRVIVNCNTSIYRASSLSNCRHTSSVEE

SEQ ID NO: 1125 - protein, 42 aa, Artificial Sequence
  chemically synthesized
SQVSPFKIPIEDLEDRVLVNCNTSIYRASSLSNCRHTSSVEE

SEQ ID NO: 1126 - protein, 42 aa, Artificial Sequence
  chemically synthesized
SQVSPFKIPIEDLEDRVVVNCNTSIYRASSLSNCRHTSSVEE

SEQ ID NO: 1127 - protein, 42 aa, Artificial Sequence
  chemically synthesized
SQVSPFKIPIEDLEDRVHVNCNTSIYRASSLSNCRHTSSVEE

SEQ ID NO: 1128 - protein, 42 aa, Artificial Sequence
  chemically synthesized
SQVSPFKIPIEDLEDRVMVNCNTSIYRASSLSNCRHTSSVEE

SEQ ID NO: 1129 - protein, 42 aa, Artificial Sequence
  chemically synthesized
SQVSPFKIPIEDLEDRVFINCNTSIYRASSLSNCRHTSSVEE

SEQ ID NO: 1130 - protein, 42 aa, Artificial Sequence
  chemically synthesized
SQVSPFKIPIEDLEDRVFLNCNTSIYRASSLSNCRHTSSVEE

SEQ ID NO: 1131 - protein, 42 aa, Artificial Sequence
  chemically synthesized
SQVSPFKIPIEDLEDRVFFNCNTSIYRASSLSNCRHTSSVEE

SEQ ID NO: 1132 - protein, 42 aa, Artificial Sequence
  chemically synthesized
SQVSPFKIPIEDLEDRVFHNCNTSIYRASSLSNCRHTSSVEE

SEQ ID NO: 1133 - protein, 42 aa, Artificial Sequence
  chemically synthesized
SQVSPFKIPIEDLEDRVFMNCNTSIYRASSLSNCRHTSSVEE

SEQ ID NO: 1134 - protein, 42 aa, Artificial Sequence
  chemically synthesized
SQVSPFKIPIEDLEDRVFVQCNTSIYRASSLSNCRHTSSVEE

SEQ ID NO: 1135 - protein, 42 aa, Artificial Sequence
  chemically synthesized
SQVSPFKIPIEDLEDRVFVNSNTSIYRASSLSNCRHTSSVEE

SEQ ID NO: 1136 - protein, 42 aa, Artificial Sequence
  chemically synthesized
SQVSPFKIPIEDLEDRVFVNGNTSIYRASSLSNCRHTSSVEE

SEQ ID NO: 1137 - protein, 42 aa, Artificial Sequence
  chemically synthesized
SQVSPFKIPIEDLEDRVFVNANTSIYRASSLSNCRHTSSVEE

SEQ ID NO: 1138 - protein, 42 aa, Artificial Sequence
  chemically synthesized
SQVSPFKIPIEDLEDRVFVNCQTSIYRASSLSNCRHTSSVEE

SEQ ID NO: 1139 - protein, 42 aa, Artificial Sequence
  chemically synthesized
SQVSPFKIPIEDLEDRVFVNCNSSIYRASSLSNCRHTSSVEE

SEQ ID NO: 1140 - protein, 42 aa, Artificial Sequence
  chemically synthesized
SQVSPFKIPIEDLEDRVFVNCNYSIYRASSLSNCRHTSSVEE

SEQ ID NO: 1141 - protein, 42 aa, Artificial Sequence
  chemically synthesized
SQVSPFKIPIEDLEDRVFVNCNTTIYRASSLSNCRHTSSVEE

SEQ ID NO: 1142 - protein, 42 aa, Artificial Sequence
  chemically synthesized
SQVSPFKIPIEDLEDRVFVNCNTYIYRASSLSNCRHTSSVEE

SEQ ID NO: 1143 - protein, 42 aa, Artificial Sequence
  chemically synthesized
SQVSPFKIPIEDLEDRVFVNCNTSVYRASSLSNCRHTSSVEE

SEQ ID NO: 1144 - protein, 42 aa, Artificial Sequence
  chemically synthesized
SQVSPFKIPIEDLEDRVFVNCNTSLYRASSLSNCRHTSSVEE

SEQ ID NO: 1145 - protein, 42 aa, Artificial Sequence
  chemically synthesized
SQVSPFKIPIEDLEDRVFVNCNTSHYRASSLSNCRHTSSVEE

SEQ ID NO: 1146 - protein, 42 aa, Artificial Sequence
  chemically synthesized
SQVSPFKIPIEDLEDRVFVNCNTSFYRASSLSNCRHTSSVEE

SEQ ID NO: 1147 - protein, 42 aa, Artificial Sequence
  chemically synthesized
SQVSPFKIPIEDLEDRVFVNCNTSMYRASSLSNCRHTSSVEE

SEQ ID NO: 1148 - protein, 42 aa, Artificial Sequence
  chemically synthesized
SQVSPFKIPIEDLEDRVFVNCNTSIWRASSLSNCRHTSSVEE

SEQ ID NO: 1149 - protein, 42 aa, Artificial Sequence
  chemically synthesized
SQVSPFKIPIEDLEDRVFVNCNTSIFRASSLSNCRHTSSVEE

SEQ ID NO: 1150 - protein, 42 aa, Artificial Sequence
  chemically synthesized
SQVSPFKIPIEDLEDRVFVNCNTSISRASSLSNCRHTSSVEE

SEQ ID NO: 1151 - protein, 42 aa, Artificial Sequence
  chemically synthesized
SQVSPFKIPIEDLEDRVFVNCNTSITRASSLSNCRHTSSVEE

SEQ ID NO: 1152 - protein, 42 aa, Artificial Sequence
  chemically synthesized
  misc_feature (27)..(27): Xaa can be a proteinogenic, non-proteinogenic or synthetic amino acid like ornithin or selenocystein
SQVSPFKIPIEDLEDRVFVNCNTSIYXASSLSNCRHTSSVEE

SEQ ID NO: 1153 - protein, 42 aa, Artificial Sequence
  chemically synthesized
SQVSPFKIPIEDLEDRVFVNCNTSIYHASSLSNCRHTSSVEE

SEQ ID NO: 1154 - protein, 42 aa, Artificial Sequence
  chemically synthesized
SQVSPFKIPIEDLEDRVFVNCNTSIYKASSLSNCRHTSSVEE

SEQ ID NO: 1155 - protein, 42 aa, Artificial Sequence
  chemically synthesized
SQVSPFKIPIEDLEDRVFVNCNTSIYRGSSLSNCRHTSSVEE

SEQ ID NO: 1156 - protein, 42 aa, Artificial Sequence
  chemically synthesized
SQVSPFKIPIEDLEDRVFVNCNTSIYRATSLSNCRHTSSVEE

SEQ ID NO: 1157 - protein, 42 aa, Artificial Sequence
  chemically synthesized
SQVSPFKIPIEDLEDRVFVNCNTSIYRAYSLSNCRHTSSVEE

SEQ ID NO: 1158 - protein, 42 aa, Artificial Sequence
  chemically synthesized
SQVSPFKIPIEDLEDRVFVNCNTSIYRASTLSNCRHTSSVEE

SEQ ID NO: 1159 - protein, 42 aa, Artificial Sequence
  chemically synthesized
SQVSPFKIPIEDLEDRVFVNCNTSIYRASYLSNCRHTSSVEE

SEQ ID NO: 1160 - protein, 42 aa, Artificial Sequence
  chemically synthesized
SQVSPFKIPIEDLEDRVFVNCNTSIYRASSISNCRHTSSVEE

SEQ ID NO: 1161 - protein, 42 aa, Artificial Sequence
  chemically synthesized
SQVSPFKIPIEDLEDRVFVNCNTSIYRASSVSNCRHTSSVEE

SEQ ID NO: 1162 - protein, 42 aa, Artificial Sequence
  chemically synthesized
SQVSPFKIPIEDLEDRVFVNCNTSIYRASSFSNCRHTSSVEE

SEQ ID NO: 1163 - protein, 42 aa, Artificial Sequence
  chemically synthesized
SQVSPFKIPIEDLEDRVFVNCNTSIYRASSMSNCRHTSSVEE

SEQ ID NO: 1164 - protein, 42 aa, Artificial Sequence
  chemically synthesized
SQVSPFKIPIEDLEDRVFVNCNTSIYRASSHSNCRHTSSVEE

SEQ ID NO: 1165 - protein, 42 aa, Artificial Sequence
  chemically synthesized
SQVSPFKIPIEDLEDRVFVNCNTSIYRASSLTNCRHTSSVEE

SEQ ID NO: 1166 - protein, 42 aa, Artificial Sequence
  chemically synthesized
SQVSPFKIPIEDLEDRVFVNCNTSIYRASSLYNCRHTSSVEE

SEQ ID NO: 1167 - protein, 42 aa, Artificial Sequence
  chemically synthesized
SQVSPFKIPIEDLEDRVFVNCNTSIYRASSLSQCRHTSSVEE

SEQ ID NO: 1168 - protein, 42 aa, Artificial Sequence
  chemically synthesized
SQVSPFKIPIEDLEDRVFVNCNTSIYRASSLSNSRHTSSVEE

SEQ ID NO: 1169 - protein, 42 aa, Artificial Sequence
  chemically synthesized
SQVSPFKIPIEDLEDRVFVNCNTSIYRASSLSNGRHTSSVEE

SEQ ID NO: 1170 - protein, 42 aa, Artificial Sequence
  chemically synthesized
SQVSPFKIPIEDLEDRVFVNCNTSIYRASSLSNARHTSSVEE

SEQ ID NO: 1171 - protein, 42 aa, Artificial Sequence
  chemically synthesized
  misc_feature (35)..(35): Xaa can be a proteinogenic, non-proteinogenic or synthetic amino acid like ornithin or selenocystein
SQVSPFKIPIEDLEDRVFVNCNTSIYRASSLSNCXHTSSVEE

SEQ ID NO: 1172 - protein, 42 aa, Artificial Sequence
  chemically synthesized
SQVSPFKIPIEDLEDRVFVNCNTSIYRASSLSNCHHTSSVEE

SEQ ID NO: 1173 - protein, 42 aa, Artificial Sequence
  chemically synthesized
SQVSPFKIPIEDLEDRVFVNCNTSIYRASSLSNCKHTSSVEE

SEQ ID NO: 1174 - protein, 42 aa, Artificial Sequence
  chemically synthesized
SQVSPFKIPIEDLEDRVFVNCNTSIYRASSLSNCRGTSSVEE

SEQ ID NO: 1175 - protein, 42 aa, Artificial Sequence
  chemically synthesized
SQVSPFKIPIEDLEDRVFVNCNTSIYRASSLSNCRATSSVEE

SEQ ID NO: 1176 - protein, 42 aa, Artificial Sequence
  chemically synthesized
SQVSPFKIPIEDLEDRVFVNCNTSIYRASSLSNCRITSSVEE

SEQ ID NO: 1177 - protein, 42 aa, Artificial Sequence
  chemically synthesized
SQVSPFKIPIEDLEDRVFVNCNTSIYRASSLSNCRLTSSVEE

SEQ ID NO: 1178 - protein, 42 aa, Artificial Sequence
  chemically synthesized
SQVSPFKIPIEDLEDRVFVNCNTSIYRASSLSNCRMTSSVEE

SEQ ID NO: 1179 - protein, 42 aa, Artificial Sequence
  chemically synthesized
SQVSPFKIPIEDLEDRVFVNCNTSIYRASSLSNCRVTSSVEE

SEQ ID NO: 1180 - protein, 42 aa, Artificial Sequence
  chemically synthesized
SQVSPFKIPIEDLEDRVFVNCNTSIYRASSLSNCRHSSSVEE

SEQ ID NO: 1181 - protein, 42 aa, Artificial Sequence
  chemically synthesized
SQVSPFKIPIEDLEDRVFVNCNTSIYRASSLSNCRHYSSVEE

SEQ ID NO: 1182 - protein, 42 aa, Artificial Sequence
  chemically synthesized
SQVSPFKIPIEDLEDRVFVNCNTSIYRASSLSNCRHTTSVEE

SEQ ID NO: 1183 - protein, 42 aa, Artificial Sequence
  chemically synthesized
SQVSPFKIPIEDLEDRVFVNCNTSIYRASSLSNCRHTYSVEE

SEQ ID NO: 1184 - protein, 42 aa, Artificial Sequence
  chemically synthesized
SQVSPFKIPIEDLEDRVFVNCNTSIYRASSLSNCRHTSTVEE

SEQ ID NO: 1185 - protein, 42 aa, Artificial Sequence
  chemically synthesized
SQVSPFKIPIEDLEDRVFVNCNTSIYRASSLSNCRHTSYVEE

SEQ ID NO: 1186 - protein, 42 aa, Artificial Sequence
  chemically synthesized
SQVSPFKIPIEDLEDRVFVNCNTSIYRASSLSNCRHTSSIEE

SEQ ID NO: 1187 - protein, 42 aa, Artificial Sequence
  chemically synthesized
SQVSPFKIPIEDLEDRVFVNCNTSIYRASSLSNCRHTSSLEE

SEQ ID NO: 1188 - protein, 42 aa, Artificial Sequence
  chemically synthesized
SQVSPFKIPIEDLEDRVFVNCNTSIYRASSLSNCRHTSSFEE

SEQ ID NO: 1189 - protein, 42 aa, Artificial Sequence
  chemically synthesized
SQVSPFKIPIEDLEDRVFVNCNTSIYRASSLSNCRHTSSHEE

SEQ ID NO: 1190 - protein, 42 aa, Artificial Sequence
  chemically synthesized
SQVSPFKIPIEDLEDRVFVNCNTSIYRASSLSNCRHTSSMEE

SEQ ID NO: 1191 - protein, 42 aa, Artificial Sequence
  chemically synthesized
SQVSPFKIPIEDLEDRVFVNCNTSIYRASSLSNCRHTSSVDE

SEQ ID NO: 1192 - protein, 42 aa, Artificial Sequence
  chemically synthesized
  misc_feature (41)..(41): Xaa can be a proteinogenic, non-proteinogenic or synthetic amino acid like ornithin or selenocystein
SQVSPFKIPIEDLEDRVFVNCNTSIYRASSLSNCRHTSSVXE

SEQ ID NO: 1193 - protein, 42 aa, Artificial Sequence
  chemically synthesized
SQVSPFKIPIEDLEDRVFVNCNTSIYRASSLSNCRHTSSVED

SEQ ID NO: 1194 - protein, 42 aa, Artificial Sequence
  chemically synthesized
  misc_feature (42)..(42): Xaa can be a proteinogenic, non-proteinogenic or synthetic amino acid like ornithin or selenocystein
SQVSPFKIPIEDLEDRVFVNCNTSIYRASSLSNCRHTSSVEX

SEQ ID NO: 1195 - protein, 42 aa, Artificial Sequence
  chemically synthesized
SQVSAFKIPIEDLEDRVFVNCNTSIYRASSLSNCRHTSSVEE

SEQ ID NO: 1196 - protein, 42 aa, Artificial Sequence
  chemically synthesized
SQVSGFKIPIEDLEDRVFVNCNTSIYRASSLSNCRHTSSVEE

SEQ ID NO: 1197 - protein, 42 aa, Artificial Sequence
  chemically synthesized
SQVSPFKIAIEDLEDRVFVNCNTSIYRASSLSNCRHTSSVEE

SEQ ID NO: 1198 - protein, 42 aa, Artificial Sequence
  chemically synthesized
SQVSPFKIGIEDLEDRVFVNCNTSIYRASSLSNCRHTSSVEE

SEQ ID NO: 1199 - protein, 42 aa, Artificial Sequence; identical to SEQ ID NO: 35
  chemically synthesized

SEQ ID NO: 1200 - protein, 42 aa, Artificial Sequence; identical to SEQ ID NO: 154
  chemically synthesized

SEQ ID NO: 1201 - protein, 42 aa, Artificial Sequence
  chemically synthesized
YQVSPFKIPIEEIEDRVFVNCNTSIYRASSLSNCRHTSSVEE

SEQ ID NO: 1202 - protein, 42 aa, Artificial Sequence; identical to SEQ ID NO: 274
  chemically synthesized

SEQ ID NO: 1203 - protein, 42 aa, Artificial Sequence; identical to SEQ ID NO: 392
  chemically synthesized

SEQ ID NO: 1204 - protein, 42 aa, Artificial Sequence
  chemically synthesized
SQISPFKIPIEEIEDRVFVNCNTSIYRASSLSNCRHTSSVEE

SEQ ID NO: 1205 - protein, 42 aa, Artificial Sequence
  chemically synthesized
SQPSPFKIPIEEIEDRVFVNCNTSIYRASSLSNCRHTSSVEE

SEQ ID NO: 1206 - protein, 42 aa, Artificial Sequence
  chemically synthesized
SQFSPFKIPIEEIEDRVFVNCNTSIYRASSLSNCRHTSSVEE

SEQ ID NO: 1207 - protein, 42 aa, Artificial Sequence; identical to SEQ ID NO: 511
  chemically synthesized

SEQ ID NO: 1208 - protein, 42 aa, Artificial Sequence
  chemically synthesized
SQVYPFKIPIEEIEDRVFVNCNTSIYRASSLSNCRHTSSVEE

SEQ ID NO: 1209 - protein, 42 aa, Artificial Sequence
  chemically synthesized
SQVSPWKIPIEEIEDRVFVNCNTSIYRASSLSNCRHTSSVEE

SEQ ID NO: 1210 - protein, 42 aa, Artificial Sequence
  chemically synthesized
SQVSPYKIPIEEIEDRVFVNCNTSIYRASSLSNCRHTSSVEE

SEQ ID NO: 1211 - protein, 42 aa, Artificial Sequence
  chemically synthesized
SQVSPHKIPIEEIEDRVFVNCNTSIYRASSLSNCRHTSSVEE

SEQ ID NO: 1212 - protein, 42 aa, Artificial Sequence
  chemically synthesized
SQVSPFRIPIEEIEDRVFVNCNTSIYRASSLSNCRHTSSVEE

SEQ ID NO: 1213 - protein, 42 aa, Artificial Sequence
  chemically synthesized
SQVSPFHIPIEEIEDRVFVNCNTSIYRASSLSNCRHTSSVEE

SEQ ID NO: 1214 - protein, 42 aa, Artificial Sequence
  chemically synthesized
  misc_feature (7)..(7): Xaa can be a proteinogenic, non-proteinogenic or synthetic amino acid like ornithin or selenocystein
SQVSPFXIPIEEIEDRVFVNCNTSIYRASSLSNCRHTSSVEE

SEQ ID NO: 1215 - protein, 42 aa, Artificial Sequence; identical to SEQ ID NO: 750
  chemically synthesized

SEQ ID NO: 1216 - protein, 42 aa, Artificial Sequence
  chemically synthesized
SQVSPFKHPIEEIEDRVFVNCNTSIYRASSLSNCRHTSSVEE

SEQ ID NO: 1217 - protein, 42 aa, Artificial Sequence
  chemically synthesized
SQVSPFKVPIEEIEDRVFVNCNTSIYRASSLSNCRHTSSVEE

SEQ ID NO: 1218 - protein, 42 aa, Artificial Sequence
  chemically synthesized
SQVSPFKFPIEEIEDRVFVNCNTSIYRASSLSNCRHTSSVEE

SEQ ID NO: 1219 - protein, 42 aa, Artificial Sequence
  chemically synthesized
SQVSPFKMPIEEIEDRVFVNCNTSIYRASSLSNCRHTSSVEE

SEQ ID NO: 1220 - protein, 42 aa, Artificial Sequence; identical to SEQ ID NO: 868
  chemically synthesized

SEQ ID NO: 1221 - protein, 42 aa, Artificial Sequence
  chemically synthesized
SQVSPFKIPHEEIEDRVFVNCNTSIYRASSLSNCRHTSSVEE

SEQ ID NO: 1222 - protein, 42 aa, Artificial Sequence
  chemically synthesized
SQVSPFKIPVEEIEDRVFVNCNTSIYRASSLSNCRHTSSVEE

SEQ ID NO: 1223 - protein, 42 aa, Artificial Sequence
  chemically synthesized
SQVSPFKIPFEEIEDRVFVNCNTSIYRASSLSNCRHTSSVEE

SEQ ID NO: 1224 - protein, 42 aa, Artificial Sequence
  chemically synthesized
SQVSPFKIPMEEIEDRVFVNCNTSIYRASSLSNCRHTSSVEE

SEQ ID NO: 1225 - protein, 42 aa, Artificial Sequence; identical to SEQ ID NO: 988
  chemically synthesized

SEQ ID NO: 1226 - protein, 42 aa, Artificial Sequence
  chemically synthesized
  misc_feature (11)..(11): Xaa can be a proteinogenic, non-proteinogenic or synthetic amino acid like ornithin or selenocystein
SQVSPFKIPIXEIEDRVFVNCNTSIYRASSLSNCRHTSSVEE

SEQ ID NO: 1227 - protein, 42 aa, Artificial Sequence; identical to SEQ ID NO: 1108
  chemically synthesized

SEQ ID NO: 1228 - protein, 42 aa, Artificial Sequence
  chemically synthesized
  misc_feature (12)..(12): Xaa can be a proteinogenic, non-proteinogenic or synthetic amino acid like ornithin or selenocystein
SQVSPFKIPIEXIEDRVFVNCNTSIYRASSLSNCRHTSSVEE

SEQ ID NO: 1229 - protein, 42 aa, Artificial Sequence
  chemically synthesized
SQVSPFKIPIEEIDDRVFVNCNTSIYRASSLSNCRHTSSVEE

SEQ ID NO: 1230 - protein, 42 aa, Artificial Sequence
  chemically synthesized
  misc_feature (14)..(14): Xaa can be a proteinogenic, non-proteinogenic or synthetic amino acid like ornithin or selenocystein
SQVSPFKIPIEEIXDRVFVNCNTSIYRASSLSNCRHTSSVEE

SEQ ID NO: 1231 - protein, 42 aa, Artificial Sequence
  chemically synthesized
  misc_feature (15)..(15): Xaa can be a proteinogenic, non-proteinogenic or synthetic amino acid like ornithin or selenocystein
SQVSPFKIPIEEIEXRVFVNCNTSIYRASSLSNCRHTSSVEE

SEQ ID NO: 1232 - protein, 42 aa, Artificial Sequence
  chemically synthesized
SQVSPFKIPIEEIEERVFVNCNTSIYRASSLSNCRHTSSVEE

SEQ ID NO: 1233 - protein, 42 aa, Artificial Sequence
  chemically synthesized
SQVSPFKIPIEEIEDKVFVNCNTSIYRASSLSNCRHTSSVEE

SEQ ID NO: 1234 - protein, 42 aa, Artificial Sequence
  chemically synthesized
SQVSPFKIPIEEIEDHVFVNCNTSIYRASSLSNCRHTSSVEE

SEQ ID NO: 1235 - protein, 42 aa, Artificial Sequence
  chemically synthesized
  misc_feature (16)..(16): Xaa can be a proteinogenic, non-proteinogenic or synthetic amino acid like ornithin or selenocystein
SQVSPFKIPIEEIEDXVFVNCNTSIYRASSLSNCRHTSSVEE

SEQ ID NO: 1236 - protein, 42 aa, Artificial Sequence
  chemically synthesized
SQVSPFKIPIEEIEDRIFVNCNTSIYRASSLSNCRHTSSVEE

SEQ ID NO: 1237 - protein, 42 aa, Artificial Sequence
  chemically synthesized
SQVSPFKIPIEEIEDRLFVNCNTSIYRASSLSNCRHTSSVEE

SEQ ID NO: 1238 - protein, 42 aa, Artificial Sequence
  chemically synthesized
SQVSPFKIPIEEIEDRFFVNCNTSIYRASSLSNCRHTSSVEE

SEQ ID NO: 1239 - protein, 42 aa, Artificial Sequence
  chemically synthesized
SQVSPFKIPIEEIEDRHFVNCNTSIYRASSLSNCRHTSSVEE

SEQ ID NO: 1240 - protein, 42 aa, Artificial Sequence
  chemically synthesized
SQVSPFKIPIEEIEDRMFVNCNTSIYRASSLSNCRHTSSVEE

SEQ ID NO: 1241 - protein, 42 aa, Artificial Sequence
  chemically synthesized
SQVSPFKIPIEEIEDRVIVNCNTSIYRASSLSNCRHTSSVEE

SEQ ID NO: 1242 - protein, 42 aa, Artificial Sequence
  chemically synthesized
SQVSPFKIPIEEIEDRVLVNCNTSIYRASSLSNCRHTSSVEE

SEQ ID NO: 1243 - protein, 42 aa, Artificial Sequence
  chemically synthesized
SQVSPFKIPIEEIEDRVVVNCNTSIYRASSLSNCRHTSSVEE

SEQ ID NO: 1244 - protein, 42 aa, Artificial Sequence
  chemically synthesized
SQVSPFKIPIEEIEDRVHVNCNTSIYRASSLSNCRHTSSVEE

SEQ ID NO: 1245 - protein, 42 aa, Artificial Sequence
  chemically synthesized
SQVSPFKIPIEEIEDRVMVNCNTSIYRASSLSNCRHTSSVEE

SEQ ID NO: 1246 - protein, 42 aa, Artificial Sequence
  chemically synthesized
SQVSPFKIPIEEIEDRVFINCNTSIYRASSLSNCRHTSSVEE

SEQ ID NO: 1247 - protein, 42 aa, Artificial Sequence
  chemically synthesized
SQVSPFKIPIEEIEDRVFLNCNTSIYRASSLSNCRHTSSVEE

SEQ ID NO: 1248 - protein, 42 aa, Artificial Sequence
  chemically synthesized
SQVSPFKIPIEEIEDRVFFNCNTSIYRASSLSNCRHTSSVEE

SEQ ID NO: 1249 - protein, 42 aa, Artificial Sequence
  chemically synthesized
SQVSPFKIPIEEIEDRVFHNCNTSIYRASSLSNCRHTSSVEE

SEQ ID NO: 1250 - protein, 42 aa, Artificial Sequence
  chemically synthesized
SQVSPFKIPIEEIEDRVFMNCNTSIYRASSLSNCRHTSSVEE

SEQ ID NO: 1251 - protein, 42 aa, Artificial Sequence
  chemically synthesized
SQVSPFKIPIEEIEDRVFVQCNTSIYRASSLSNCRHTSSVEE

SEQ ID NO: 1252 - protein, 42 aa, Artificial Sequence
  chemically synthesized
SQVSPFKIPIEEIEDRVFVNSNTSIYRASSLSNCRHTSSVEE

SEQ ID NO: 1253 - protein, 42 aa, Artificial Sequence
  chemically synthesized
SQVSPFKIPIEEIEDRVFVNGNTSIYRASSLSNCRHTSSVEE

SEQ ID NO: 1254 - protein, 42 aa, Artificial Sequence
  chemically synthesized
SQVSPFKIPIEEIEDRVFVNANTSIYRASSLSNCRHTSSVEE

SEQ ID NO: 1255 - protein, 42 aa, Artificial Sequence
  chemically synthesized
SQVSPFKIPIEEIEDRVFVNCQTSIYRASSLSNCRHTSSVEE

SEQ ID NO: 1256 - protein, 42 aa, Artificial Sequence
  chemically synthesized
SQVSPFKIPIEEIEDRVFVNCNSSIYRASSLSNCRHTSSVEE

SEQ ID NO: 1257 - protein, 42 aa, Artificial Sequence
  chemically synthesized
SQVSPFKIPIEEIEDRVFVNCNYSIYRASSLSNCRHTSSVEE

SEQ ID NO: 1258 - protein, 42 aa, Artificial Sequence
  chemically synthesized
SQVSPFKIPIEEIEDRVFVNCNTTIYRASSLSNCRHTSSVEE

SEQ ID NO: 1259 - protein, 42 aa, Artificial Sequence
  chemically synthesized
SQVSPFKIPIEEIEDRVFVNCNTYIYRASSLSNCRHTSSVEE

SEQ ID NO: 1260 - protein, 42 aa, Artificial Sequence
  chemically synthesized
SQVSPFKIPIEEIEDRVFVNCNTSVYRASSLSNCRHTSSVEE

SEQ ID NO: 1261 - protein, 42 aa, Artificial Sequence
  chemically synthesized
SQVSPFKIPIEEIEDRVFVNCNTSLYRASSLSNCRHTSSVEE

SEQ ID NO: 1262 - protein, 42 aa, Artificial Sequence
  chemically synthesized
SQVSPFKIPIEEIEDRVFVNCNTSHYRASSLSNCRHTSSVEE

SEQ ID NO: 1263 - protein, 42 aa, Artificial Sequence
  chemically synthesized
SQVSPFKIPIEEIEDRVFVNCNTSFYRASSLSNCRHTSSVEE

SEQ ID NO: 1264 - protein, 42 aa, Artificial Sequence
  chemically synthesized
SQVSPFKIPIEEIEDRVFVNCNTSMYRASSLSNCRHTSSVEE

SEQ ID NO: 1265 - protein, 42 aa, Artificial Sequence
  chemically synthesized
SQVSPFKIPIEEIEDRVFVNCNTSIWRASSLSNCRHTSSVEE

SEQ ID NO: 1266 - protein, 42 aa, Artificial Sequence
  chemically synthesized
SQVSPFKIPIEEIEDRVFVNCNTSIFRASSLSNCRHTSSVEE

SEQ ID NO: 1267 - protein, 42 aa, Artificial Sequence
  chemically synthesized
SQVSPFKIPIEEIEDRVFVNCNTSISRASSLSNCRHTSSVEE

SEQ ID NO: 1268 - protein, 42 aa, Artificial Sequence
  chemically synthesized
SQVSPFKIPIEEIEDRVFVNCNTSITRASSLSNCRHTSSVEE

SEQ ID NO: 1269 - protein, 42 aa, Artificial Sequence
  chemically synthesized
  misc_feature (27)..(27): Xaa can be a proteinogenic, non-proteinogenic or synthetic amino acid like ornithin or selenocystein
SQVSPFKIPIEEIEDRVFVNCNTSIYXASSLSNCRHTSSVEE

SEQ ID NO: 1270 - protein, 42 aa, Artificial Sequence
  chemically synthesized
SQVSPFKIPIEEIEDRVFVNCNTSIYHASSLSNCRHTSSVEE

SEQ ID NO: 1271 - protein, 42 aa, Artificial Sequence
  chemically synthesized
SQVSPFKIPIEEIEDRVFVNCNTSIYKASSLSNCRHTSSVEE

SEQ ID NO: 1272 - protein, 42 aa, Artificial Sequence
  chemically synthesized
SQVSPFKIPIEEIEDRVFVNCNTSIYRGSSLSNCRHTSSVEE

SEQ ID NO: 1273 - protein, 42 aa, Artificial Sequence
  chemically synthesized
SQVSPFKIPIEEIEDRVFVNCNTSIYRATSLSNCRHTSSVEE

SEQ ID NO: 1274 - protein, 42 aa, Artificial Sequence
  chemically synthesized
SQVSPFKIPIEEIEDRVFVNCNTSIYRAYSLSNCRHTSSVEE

SEQ ID NO: 1275 - protein, 42 aa, Artificial Sequence
  chemically synthesized
SQVSPFKIPIEEIEDRVFVNCNTSIYRASTLSNCRHTSSVEE

SEQ ID NO: 1276 - protein, 42 aa, Artificial Sequence
  chemically synthesized
SQVSPFKIPIEEIEDRVFVNCNTSIYRASYLSNCRHTSSVEE

SEQ ID NO: 1277 - protein, 42 aa, Artificial Sequence
  chemically synthesized
SQVSPFKIPIEEIEDRVFVNCNTSIYRASSISNCRHTSSVEE

SEQ ID NO: 1278 - protein, 42 aa, Artificial Sequence
  chemically synthesized
SQVSPFKIPIEEIEDRVFVNCNTSIYRASSVSNCRHTSSVEE

SEQ ID NO: 1279 - protein, 42 aa, Artificial Sequence
  chemically synthesized
SQVSPFKIPIEEIEDRVFVNCNTSIYRASSFSNCRHTSSVEE

SEQ ID NO: 1280 - protein, 42 aa, Artificial Sequence
  chemically synthesized
SQVSPFKIPIEEIEDRVFVNCNTSIYRASSMSNCRHTSSVEE

SEQ ID NO: 1281 - protein, 42 aa, Artificial Sequence
  chemically synthesized
SQVSPFKIPIEEIEDRVFVNCNTSIYRASSHSNCRHTSSVEE

SEQ ID NO: 1282 - protein, 42 aa, Artificial Sequence
  chemically synthesized
SQVSPFKIPIEEIEDRVFVNCNTSIYRASSLTNCRHTSSVEE

SEQ ID NO: 1283 - protein, 42 aa, Artificial Sequence
  chemically synthesized
SQVSPFKIPIEEIEDRVFVNCNTSIYRASSLYNCRHTSSVEE

SEQ ID NO: 1284 - protein, 42 aa, Artificial Sequence
  chemically synthesized
SQVSPFKIPIEEIEDRVFVNCNTSIYRASSLSQCRHTSSVEE

SEQ ID NO: 1285 - protein, 42 aa, Artificial Sequence
  chemically synthesized
SQVSPFKIPIEEIEDRVFVNCNTSIYRASSLSNSRHTSSVEE

SEQ ID NO: 1286 - protein, 42 aa, Artificial Sequence
  chemically synthesized
SQVSPFKIPIEEIEDRVFVNCNTSIYRASSLSNGRHTSSVEE

SEQ ID NO: 1287 - protein, 42 aa, Artificial Sequence
  chemically synthesized
SQVSPFKIPIEEIEDRVFVNCNTSIYRASSLSNARHTSSVEE

SEQ ID NO: 1288 - protein, 42 aa, Artificial Sequence
  chemically synthesized
  misc_feature (35)..(35): Xaa can be a proteinogenic, non-proteinogenic or synthetic amino acid like ornithin or selenocystein
SQVSPFKIPIEEIEDRVFVNCNTSIYRASSLSNCXHTSSVEE

SEQ ID NO: 1289 - protein, 42 aa, Artificial Sequence
  chemically synthesized
SQVSPFKIPIEEIEDRVFVNCNTSIYRASSLSNCHHTSSVEE

SEQ ID NO: 1290 - protein, 42 aa, Artificial Sequence
  chemically synthesized
SQVSPFKIPIEEIEDRVFVNCNTSIYRASSLSNCKHTSSVEE

SEQ ID NO: 1291 - protein, 42 aa, Artificial Sequence
  chemically synthesized
SQVSPFKIPIEEIEDRVFVNCNTSIYRASSLSNCRGTSSVEE

SEQ ID NO: 1292 - protein, 42 aa, Artificial Sequence
  chemically synthesized
SQVSPFKIPIEEIEDRVFVNCNTSIYRASSLSNCRATSSVEE

SEQ ID NO: 1293 - protein, 42 aa, Artificial Sequence
  chemically synthesized
SQVSPFKIPIEEIEDRVFVNCNTSIYRASSLSNCRITSSVEE

SEQ ID NO: 1294 - protein, 42 aa, Artificial Sequence
  chemically synthesized
SQVSPFKIPIEEIEDRVFVNCNTSIYRASSLSNCRLTSSVEE

SEQ ID NO: 1295 - protein, 42 aa, Artificial Sequence
  chemically synthesized
SQVSPFKIPIEEIEDRVFVNCNTSIYRASSLSNCRMTSSVEE

SEQ ID NO: 1296 - protein, 42 aa, Artificial Sequence
  chemically synthesized
SQVSPFKIPIEEIEDRVFVNCNTSIYRASSLSNCRVTSSVEE

SEQ ID NO: 1297 - protein, 42 aa, Artificial Sequence
  chemically synthesized
SQVSPFKIPIEEIEDRVFVNCNTSIYRASSLSNCRHSSSVEE

SEQ ID NO: 1298 - protein, 42 aa, Artificial Sequence
  chemically synthesized
SQVSPFKIPIEEIEDRVFVNCNTSIYRASSLSNCRHYSSVEE

SEQ ID NO: 1299 - protein, 42 aa, Artificial Sequence
  chemically synthesized
SQVSPFKIPIEEIEDRVFVNCNTSIYRASSLSNCRHTTSVEE

SEQ ID NO: 1300 - protein, 42 aa, Artificial Sequence
  chemically synthesized
SQVSPFKIPIEEIEDRVFVNCNTSIYRASSLSNCRHTYSVEE

SEQ ID NO: 1301 - protein, 42 aa, Artificial Sequence
  chemically synthesized
SQVSPFKIPIEEIEDRVFVNCNTSIYRASSLSNCRHTSTVEE

SEQ ID NO: 1302 - protein, 42 aa, Artificial Sequence
  chemically synthesized
SQVSPFKIPIEEIEDRVFVNCNTSIYRASSLSNCRHTSYVEE

SEQ ID NO: 1303 - protein, 42 aa, Artificial Sequence
  chemically synthesized
SQVSPFKIPIEEIEDRVFVNCNTSIYRASSLSNCRHTSSIEE

SEQ ID NO: 1304 - protein, 42 aa, Artificial Sequence
  chemically synthesized
SQVSPFKIPIEEIEDRVFVNCNTSIYRASSLSNCRHTSSLEE

SEQ ID NO: 1305 - protein, 42 aa, Artificial Sequence
  chemically synthesized
SQVSPFKIPIEEIEDRVFVNCNTSIYRASSLSNCRHTSSFEE

SEQ ID NO: 1306 - protein, 42 aa, Artificial Sequence
  chemically synthesized
SQVSPFKIPIEEIEDRVFVNCNTSIYRASSLSNCRHTSSHEE

SEQ ID NO: 1307 - protein, 42 aa, Artificial Sequence
  chemically synthesized
SQVSPFKIPIEEIEDRVFVNCNTSIYRASSLSNCRHTSSMEE

SEQ ID NO: 1308 - protein, 42 aa, Artificial Sequence
  chemically synthesized
SQVSPFKIPIEEIEDRVFVNCNTSIYRASSLSNCRHTSSVDE

SEQ ID NO: 1309 - protein, 42 aa, Artificial Sequence
  chemically synthesized
  misc_feature (41)..(41): Xaa can be a proteinogenic, non-proteinogenic or synthetic amino acid like ornithin or selenocystein
SQVSPFKIPIEEIEDRVFVNCNTSIYRASSLSNCRHTSSVXE

SEQ ID NO: 1310 - protein, 42 aa, Artificial Sequence
  chemically synthesized
SQVSPFKIPIEEIEDRVFVNCNTSIYRASSLSNCRHTSSVED

SEQ ID NO: 1311 - protein, 42 aa, Artificial Sequence
  chemically synthesized
  misc_feature (42)..(42): Xaa can be a proteinogenic, non-proteinogenic or synthetic amino acid like ornithin or selenocystein
SQVSPFKIPIEEIEDRVFVNCNTSIYRASSLSNCRHTSSVEX

SEQ ID NO: 1312 - protein, 42 aa, Artificial Sequence
  chemically synthesized
SQVSAFKIPIEEIEDRVFVNCNTSIYRASSLSNCRHTSSVEE

SEQ ID NO: 1313 - protein, 42 aa, Artificial Sequence
  chemically synthesized
SQVSGFKIPIEEIEDRVFVNCNTSIYRASSLSNCRHTSSVEE

SEQ ID NO: 1314 - protein, 42 aa, Artificial Sequence
  chemically synthesized
SQVSPFKIAIEEIEDRVFVNCNTSIYRASSLSNCRHTSSVEE

SEQ ID NO: 1315 - protein, 42 aa, Artificial Sequence
  chemically synthesized
SQVSPFKIGIEEIEDRVFVNCNTSIYRASSLSNCRHTSSVEE

SEQ ID NO: 1316 - protein, 42 aa, Artificial Sequence; identical to SEQ ID NO: 39
  chemically synthesized

SEQ ID NO: 1317 - protein, 42 aa, Artificial Sequence; identical to SEQ ID NO: 158
  chemically synthesized

SEQ ID NO: 1318 - protein, 42 aa, Artificial Sequence
  chemically synthesized
YQVSPFKIPIEELDDRVFVNCNTSIYRASSLSNCRHTSSVEE

SEQ ID NO: 1319 - protein, 42 aa, Artificial Sequence; identical to SEQ ID NO: 278
  chemically synthesized

SEQ ID NO: 1320 - protein, 42 aa, Artificial Sequence; identical to SEQ ID NO: 396
  chemically synthesized

SEQ ID NO: 1321 - protein, 42 aa, Artificial Sequence
  chemically synthesized
SQISPFKIPIEELDDRVFVNCNTSIYRASSLSNCRHTSSVEE

SEQ ID NO: 1322 - protein, 42 aa, Artificial Sequence
  chemically synthesized
SQPSPFKIPIEELDDRVFVNCNTSIYRASSLSNCRHTSSVEE

SEQ ID NO: 1323 - protein, 42 aa, Artificial Sequence
  chemically synthesized
SQFSPFKIPIEELDDRVFVNCNTSIYRASSLSNCRHTSSVEE

SEQ ID NO: 1324 - protein, 42 aa, Artificial Sequence; identical to SEQ ID NO: 515
  chemically synthesized

SEQ ID NO: 1325 - protein, 42 aa, Artificial Sequence
  chemically synthesized
SQVYPFKIPIEELDDRVFVNCNTSIYRASSLSNCRHTSSVEE

SEQ ID NO: 1326 - protein, 42 aa, Artificial Sequence
  chemically synthesized
SQVSPWKIPIEELDDRVFVNCNTSIYRASSLSNCRHTSSVEE

SEQ ID NO: 1327 - protein, 42 aa, Artificial Sequence
  chemically synthesized
SQVSPYKIPIEELDDRVFVNCNTSIYRASSLSNCRHTSSVEE

SEQ ID NO: 1328 - protein, 42 aa, Artificial Sequence
  chemically synthesized
SQVSPHKIPIEELDDRVFVNCNTSIYRASSLSNCRHTSSVEE

SEQ ID NO: 1329 - protein, 42 aa, Artificial Sequence
  chemically synthesized
SQVSPFRIPIEELDDRVFVNCNTSIYRASSLSNCRHTSSVEE

SEQ ID NO: 1330 - protein, 42 aa, Artificial Sequence
  chemically synthesized
SQVSPFHIPIEELDDRVFVNCNTSIYRASSLSNCRHTSSVEE

SEQ ID NO: 1331 - protein, 42 aa, Artificial Sequence
  chemically synthesized
  misc_feature (7)..(7): Xaa can be a proteinogenic, non-proteinogenic or synthetic amino acid like ornithin or selenocystein
SQVSPFXIPIEELDDRVFVNCNTSIYRASSLSNCRHTSSVEE

SEQ ID NO: 1332 - protein, 42 aa, Artificial Sequence; identical to SEQ ID NO: 754
  chemically synthesized

SEQ ID NO: 1333 - protein, 42 aa, Artificial Sequence
  chemically synthesized
SQVSPFKHPIEELDDRVFVNCNTSIYRASSLSNCRHTSSVEE

SEQ ID NO: 1334 - protein, 42 aa, Artificial Sequence
  chemically synthesized
SQVSPFKVPIEELDDRVFVNCNTSIYRASSLSNCRHTSSVEE

SEQ ID NO: 1335 - protein, 42 aa, Artificial Sequence
  chemically synthesized
SQVSPFKFPIEELDDRVFVNCNTSIYRASSLSNCRHTSSVEE

SEQ ID NO: 1336 - protein, 42 aa, Artificial Sequence
  chemically synthesized
SQVSPFKMPIEELDDRVFVNCNTSIYRASSLSNCRHTSSVEE

SEQ ID NO: 1337 - protein, 42 aa, Artificial Sequence; identical to SEQ ID NO: 872
  chemically synthesized

SEQ ID NO: 1338 - protein, 42 aa, Artificial Sequence
  chemically synthesized
SQVSPFKIPHEELDDRVFVNCNTSIYRASSLSNCRHTSSVEE

SEQ ID NO: 1339 - protein, 42 aa, Artificial Sequence
  chemically synthesized
SQVSPFKIPVEELDDRVFVNCNTSIYRASSLSNCRHTSSVEE

SEQ ID NO: 1340 - protein, 42 aa, Artificial Sequence
  chemically synthesized
SQVSPFKIPFEELDDRVFVNCNTSIYRASSLSNCRHTSSVEE

SEQ ID NO: 1341 - protein, 42 aa, Artificial Sequence
  chemically synthesized
SQVSPFKIPMEELDDRVFVNCNTSIYRASSLSNCRHTSSVEE

SEQ ID NO: 1342 - protein, 42 aa, Artificial Sequence; identical to SEQ ID NO: 992
  chemically synthesized

SEQ ID NO: 1343 - protein, 42 aa, Artificial Sequence
  chemically synthesized
  misc_feature (11)..(11): Xaa can be a proteinogenic, non-proteinogenic or synthetic amino acid like ornithin or selenocystein
SQVSPFKIPIXELDDRVFVNCNTSIYRASSLSNCRHTSSVEE

SEQ ID NO: 1344 - protein, 42 aa, Artificial Sequence; identical to SEQ ID NO: 1112
  chemically synthesized

SEQ ID NO: 1345 - protein, 42 aa, Artificial Sequence
  chemically synthesized
  misc_feature (12)..(12): Xaa can be a proteinogenic, non-proteinogenic or synthetic amino acid like ornithin or selenocystein
SQVSPFKIPIEXLDDRVFVNCNTSIYRASSLSNCRHTSSVEE

SEQ ID NO: 1346 - protein, 42 aa, Artificial Sequence
  chemically synthesized
SQVSPFKIPIEEVDDRVFVNCNTSIYRASSLSNCRHTSSVEE

SEQ ID NO: 1347 - protein, 42 aa, Artificial Sequence; identical to SEQ ID NO: 1229
  chemically synthesized

SEQ ID NO: 1348 - protein, 42 aa, Artificial Sequence
  chemically synthesized
SQVSPFKIPIEEFDDRVFVNCNTSIYRASSLSNCRHTSSVEE

SEQ ID NO: 1349 - protein, 42 aa, Artificial Sequence
  chemically synthesized
SQVSPFKIPIEEHDDRVFVNCNTSIYRASSLSNCRHTSSVEE

SEQ ID NO: 1350 - protein, 42 aa, Artificial Sequence
  chemically synthesized
SQVSPFKIPIEEMDDRVFVNCNTSIYRASSLSNCRHTSSVEE

SEQ ID NO: 1351 - protein, 42 aa, Artificial Sequence
  chemically synthesized
  misc_feature (15)..(15): Xaa can be a proteinogenic, non-proteinogenic or synthetic amino acid like ornithin or selenocystein
SQVSPFKIPIEELDXRVFVNCNTSIYRASSLSNCRHTSSVEE

SEQ ID NO: 1352 - protein, 42 aa, Artificial Sequence
  chemically synthesized
SQVSPFKIPIEELDERVFVNCNTSIYRASSLSNCRHTSSVEE

SEQ ID NO: 1353 - protein, 42 aa, Artificial Sequence
  chemically synthesized
SQVSPFKIPIEELDDKVFVNCNTSIYRASSLSNCRHTSSVEE

SEQ ID NO: 1354 - protein, 42 aa, Artificial Sequence
  chemically synthesized
SQVSPFKIPIEELDDHVFVNCNTSIYRASSLSNCRHTSSVEE

SEQ ID NO: 1355 - protein, 42 aa, Artificial Sequence
  chemically synthesized
  misc_feature (16)..(16): Xaa can be a proteinogenic, non-proteinogenic or synthetic amino acid like ornithin or selenocystein
SQVSPFKIPIEELDDXVFVNCNTSIYRASSLSNCRHTSSVEE

SEQ ID NO: 1356 - protein, 42 aa, Artificial Sequence
  chemically synthesized
SQVSPFKIPIEELDDRIFVNCNTSIYRASSLSNCRHTSSVEE

SEQ ID NO: 1357 - protein, 42 aa, Artificial Sequence
  chemically synthesized
SQVSPFKIPIEELDDRLFVNCNTSIYRASSLSNCRHTSSVEE

SEQ ID NO: 1358 - protein, 42 aa, Artificial Sequence
  chemically synthesized
SQVSPFKIPIEELDDRFFVNCNTSIYRASSLSNCRHTSSVEE

SEQ ID NO: 1359 - protein, 42 aa, Artificial Sequence
  chemically synthesized
SQVSPFKIPIEELDDRHFVNCNTSIYRASSLSNCRHTSSVEE

SEQ ID NO: 1360 - protein, 42 aa, Artificial Sequence
  chemically synthesized
SQVSPFKIPIEELDDRMFVNCNTSIYRASSLSNCRHTSSVEE

SEQ ID NO: 1361 - protein, 42 aa, Artificial Sequence
  chemically synthesized
SQVSPFKIPIEELDDRVIVNCNTSIYRASSLSNCRHTSSVEE

SEQ ID NO: 1362 - protein, 42 aa, Artificial Sequence
  chemically synthesized
SQVSPFKIPIEELDDRVLVNCNTSIYRASSLSNCRHTSSVEE

SEQ ID NO: 1363 - protein, 42 aa, Artificial Sequence
  chemically synthesized
SQVSPFKIPIEELDDRVVVNCNTSIYRASSLSNCRHTSSVEE

SEQ ID NO: 1364 - protein, 42 aa, Artificial Sequence
  chemically synthesized
SQVSPFKIPIEELDDRVHVNCNTSIYRASSLSNCRHTSSVEE

SEQ ID NO: 1365 - protein, 42 aa, Artificial Sequence
  chemically synthesized
SQVSPFKIPIEELDDRVMVNCNTSIYRASSLSNCRHTSSVEE

SEQ ID NO: 1366 - protein, 42 aa, Artificial Sequence
  chemically synthesized
SQVSPFKIPIEELDDRVFINCNTSIYRASSLSNCRHTSSVEE

SEQ ID NO: 1367 - protein, 42 aa, Artificial Sequence
  chemically synthesized
SQVSPFKIPIEELDDRVFLNCNTSIYRASSLSNCRHTSSVEE

SEQ ID NO: 1368 - protein, 42 aa, Artificial Sequence
  chemically synthesized
SQVSPFKIPIEELDDRVFFNCNTSIYRASSLSNCRHTSSVEE

SEQ ID NO: 1369 - protein, 42 aa, Artificial Sequence
  chemically synthesized
SQVSPFKIPIEELDDRVFHNCNTSIYRASSLSNCRHTSSVEE

SEQ ID NO: 1370 - protein, 42 aa, Artificial Sequence
  chemically synthesized
SQVSPFKIPIEELDDRVFMNCNTSIYRASSLSNCRHTSSVEE

SEQ ID NO: 1371 - protein, 42 aa, Artificial Sequence
  chemically synthesized
SQVSPFKIPIEELDDRVFVQCNTSIYRASSLSNCRHTSSVEE

SEQ ID NO: 1372 - protein, 42 aa, Artificial Sequence
  chemically synthesized
SQVSPFKIPIEELDDRVFVNSNTSIYRASSLSNCRHTSSVEE

SEQ ID NO: 1373 - protein, 42 aa, Artificial Sequence
  chemically synthesized
SQVSPFKIPIEELDDRVFVNGNTSIYRASSLSNCRHTSSVEE

SEQ ID NO: 1374 - protein, 42 aa, Artificial Sequence
  chemically synthesized
SQVSPFKIPIEELDDRVFVNANTSIYRASSLSNCRHTSSVEE

SEQ ID NO: 1375 - protein, 42 aa, Artificial Sequence
  chemically synthesized
SQVSPFKIPIEELDDRVFVNCQTSIYRASSLSNCRHTSSVEE

SEQ ID NO: 1376 - protein, 42 aa, Artificial Sequence
  chemically synthesized
SQVSPFKIPIEELDDRVFVNCNSSIYRASSLSNCRHTSSVEE

SEQ ID NO: 1377 - protein, 42 aa, Artificial Sequence
  chemically synthesized
SQVSPFKIPIEELDDRVFVNCNYSIYRASSLSNCRHTSSVEE

SEQ ID NO: 1378 - protein, 42 aa, Artificial Sequence
  chemically synthesized
SQVSPFKIPIEELDDRVFVNCNTTIYRASSLSNCRHTSSVEE

SEQ ID NO: 1379 - protein, 42 aa, Artificial Sequence
  chemically synthesized
SQVSPFKIPIEELDDRVFVNCNTYIYRASSLSNCRHTSSVEE

SEQ ID NO: 1380 - protein, 42 aa, Artificial Sequence
  chemically synthesized
SQVSPFKIPIEELDDRVFVNCNTSVYRASSLSNCRHTSSVEE

SEQ ID NO: 1381 - protein, 42 aa, Artificial Sequence
  chemically synthesized
SQVSPFKIPIEELDDRVFVNCNTSLYRASSLSNCRHTSSVEE

SEQ ID NO: 1382 - protein, 42 aa, Artificial Sequence
  chemically synthesized
SQVSPFKIPIEELDDRVFVNCNTSHYRASSLSNCRHTSSVEE

SEQ ID NO: 1383 - protein, 42 aa, Artificial Sequence
  chemically synthesized
SQVSPFKIPIEELDDRVFVNCNTSFYRASSLSNCRHTSSVEE

SEQ ID NO: 1384 - protein, 42 aa, Artificial Sequence
  chemically synthesized
SQVSPFKIPIEELDDRVFVNCNTSMYRASSLSNCRHTSSVEE

SEQ ID NO: 1385 - protein, 42 aa, Artificial Sequence
  chemically synthesized
SQVSPFKIPIEELDDRVFVNCNTSIWRASSLSNCRHTSSVEE

SEQ ID NO: 1386 - protein, 42 aa, Artificial Sequence
  chemically synthesized
SQVSPFKIPIEELDDRVFVNCNTSIFRASSLSNCRHTSSVEE

SEQ ID NO: 1387 - protein, 42 aa, Artificial Sequence
  chemically synthesized
SQVSPFKIPIEELDDRVFVNCNTSISRASSLSNCRHTSSVEE

SEQ ID NO: 1388 - protein, 42 aa, Artificial Sequence
  chemically synthesized
SQVSPFKIPIEELDDRVFVNCNTSITRASSLSNCRHTSSVEE

SEQ ID NO: 1389 - protein, 42 aa, Artificial Sequence
  chemically synthesized
  misc_feature (27)..(27): Xaa can be a proteinogenic, non-proteinogenic or synthetic amino acid like ornithin or selenocystein
SQVSPFKIPIEELDDRVFVNCNTSIYXASSLSNCRHTSSVEE

SEQ ID NO: 1390 - protein, 42 aa, Artificial Sequence
  chemically synthesized
SQVSPFKIPIEELDDRVFVNCNTSIYHASSLSNCRHTSSVEE

SEQ ID NO: 1391 - protein, 42 aa, Artificial Sequence
  chemically synthesized
SQVSPFKIPIEELDDRVFVNCNTSIYKASSLSNCRHTSSVEE

SEQ ID NO: 1392 - protein, 42 aa, Artificial Sequence
  chemically synthesized
SQVSPFKIPIEELDDRVFVNCNTSIYRGSSLSNCRHTSSVEE

SEQ ID NO: 1393 - protein, 42 aa, Artificial Sequence
  chemically synthesized
SQVSPFKIPIEELDDRVFVNCNTSIYRATSLSNCRHTSSVEE

SEQ ID NO: 1394 - protein, 42 aa, Artificial Sequence
  chemically synthesized
SQVSPFKIPIEELDDRVFVNCNTSIYRAYSLSNCRHTSSVEE

SEQ ID NO: 1395 - protein, 42 aa, Artificial Sequence
  chemically synthesized
SQVSPFKIPIEELDDRVFVNCNTSIYRASTLSNCRHTSSVEE

SEQ ID NO: 1396 - protein, 42 aa, Artificial Sequence
  chemically synthesized
SQVSPFKIPIEELDDRVFVNCNTSIYRASYLSNCRHTSSVEE

SEQ ID NO: 1397 - protein, 42 aa, Artificial Sequence
  chemically synthesized
SQVSPFKIPIEELDDRVFVNCNTSIYRASSISNCRHTSSVEE

SEQ ID NO: 1398 - protein, 42 aa, Artificial Sequence
  chemically synthesized
SQVSPFKIPIEELDDRVFVNCNTSIYRASSVSNCRHTSSVEE

SEQ ID NO: 1399 - protein, 42 aa, Artificial Sequence
  chemically synthesized
SQVSPFKIPIEELDDRVFVNCNTSIYRASSFSNCRHTSSVEE

SEQ ID NO: 1400 - protein, 42 aa, Artificial Sequence
  chemically synthesized
SQVSPFKIPIEELDDRVFVNCNTSIYRASSMSNCRHTSSVEE

SEQ ID NO: 1401 - protein, 42 aa, Artificial Sequence
  chemically synthesized
SQVSPFKIPIEELDDRVFVNCNTSIYRASSHSNCRHTSSVEE

SEQ ID NO: 1402 - protein, 42 aa, Artificial Sequence
  chemically synthesized
SQVSPFKIPIEELDDRVFVNCNTSIYRASSLTNCRHTSSVEE

SEQ ID NO: 1403 - protein, 42 aa, Artificial Sequence
  chemically synthesized
SQVSPFKIPIEELDDRVFVNCNTSIYRASSLYNCRHTSSVEE

SEQ ID NO: 1404 - protein, 42 aa, Artificial Sequence
  chemically synthesized
SQVSPFKIPIEELDDRVFVNCNTSIYRASSLSQCRHTSSVEE

SEQ ID NO: 1405 - protein, 42 aa, Artificial Sequence
  chemically synthesized
SQVSPFKIPIEELDDRVFVNCNTSIYRASSLSNSRHTSSVEE

SEQ ID NO: 1406 - protein, 42 aa, Artificial Sequence
  chemically synthesized
SQVSPFKIPIEELDDRVFVNCNTSIYRASSLSNGRHTSSVEE

SEQ ID NO: 1407 - protein, 42 aa, Artificial Sequence
  chemically synthesized
SQVSPFKIPIEELDDRVFVNCNTSIYRASSLSNARHTSSVEE

SEQ ID NO: 1408 - protein, 42 aa, Artificial Sequence
  chemically synthesized
  misc_feature (35)..(35): Xaa can be a proteinogenic, non-proteinogenic or synthetic amino acid like ornithin or selenocystein
SQVSPFKIPIEELDDRVFVNCNTSIYRASSLSNCXHTSSVEE

SEQ ID NO: 1409 - protein, 42 aa, Artificial Sequence
  chemically synthesized
SQVSPFKIPIEELDDRVFVNCNTSIYRASSLSNCHHTSSVEE

SEQ ID NO: 1410 - protein, 42 aa, Artificial Sequence
  chemically synthesized
SQVSPFKIPIEELDDRVFVNCNTSIYRASSLSNCKHTSSVEE

SEQ ID NO: 1411 - protein, 42 aa, Artificial Sequence
  chemically synthesized
SQVSPFKIPIEELDDRVFVNCNTSIYRASSLSNCRGTSSVEE

SEQ ID NO: 1412 - protein, 42 aa, Artificial Sequence
  chemically synthesized
SQVSPFKIPIEELDDRVFVNCNTSIYRASSLSNCRATSSVEE

SEQ ID NO: 1413 - protein, 42 aa, Artificial Sequence
  chemically synthesized
SQVSPFKIPIEELDDRVFVNCNTSIYRASSLSNCRITSSVEE

SEQ ID NO: 1414 - protein, 42 aa, Artificial Sequence
  chemically synthesized
SQVSPFKIPIEELDDRVFVNCNTSIYRASSLSNCRLTSSVEE

SEQ ID NO: 1415 - protein, 42 aa, Artificial Sequence
  chemically synthesized
SQVSPFKIPIEELDDRVFVNCNTSIYRASSLSNCRMTSSVEE

SEQ ID NO: 1416 - protein, 42 aa, Artificial Sequence
  chemically synthesized
SQVSPFKIPIEELDDRVFVNCNTSIYRASSLSNCRVTSSVEE

SEQ ID NO: 1417 - protein, 42 aa, Artificial Sequence
  chemically synthesized
SQVSPFKIPIEELDDRVFVNCNTSIYRASSLSNCRHSSSVEE

SEQ ID NO: 1418 - protein, 42 aa, Artificial Sequence
  chemically synthesized
SQVSPFKIPIEELDDRVFVNCNTSIYRASSLSNCRHYSSVEE

SEQ ID NO: 1419 - protein, 42 aa, Artificial Sequence
  chemically synthesized
SQVSPFKIPIEELDDRVFVNCNTSIYRASSLSNCRHTTSVEE

SEQ ID NO: 1420 - protein, 42 aa, Artificial Sequence
  chemically synthesized
SQVSPFKIPIEELDDRVFVNCNTSIYRASSLSNCRHTYSVEE

SEQ ID NO: 1421 - protein, 42 aa, Artificial Sequence
  chemically synthesized
SQVSPFKIPIEELDDRVFVNCNTSIYRASSLSNCRHTSTVEE

SEQ ID NO: 1422 - protein, 42 aa, Artificial Sequence
  chemically synthesized
SQVSPFKIPIEELDDRVFVNCNTSIYRASSLSNCRHTSYVEE

SEQ ID NO: 1423 - protein, 42 aa, Artificial Sequence
  chemically synthesized
SQVSPFKIPIEELDDRVFVNCNTSIYRASSLSNCRHTSSIEE

SEQ ID NO: 1424 - protein, 42 aa, Artificial Sequence
  chemically synthesized
SQVSPFKIPIEELDDRVFVNCNTSIYRASSLSNCRHTSSLEE

SEQ ID NO: 1425 - protein, 42 aa, Artificial Sequence
  chemically synthesized
SQVSPFKIPIEELDDRVFVNCNTSIYRASSLSNCRHTSSFEE

SEQ ID NO: 1426 - protein, 42 aa, Artificial Sequence
  chemically synthesized
SQVSPFKIPIEELDDRVFVNCNTSIYRASSLSNCRHTSSHEE

SEQ ID NO: 1427 - protein, 42 aa, Artificial Sequence
  chemically synthesized
SQVSPFKIPIEELDDRVFVNCNTSIYRASSLSNCRHTSSMEE

SEQ ID NO: 1428 - protein, 42 aa, Artificial Sequence
  chemically synthesized
SQVSPFKIPIEELDDRVFVNCNTSIYRASSLSNCRHTSSVDE

SEQ ID NO: 1429 - protein, 42 aa, Artificial Sequence
  chemically synthesized
  misc_feature (41)..(41): Xaa can be a proteinogenic, non-proteinogenic or synthetic amino acid like ornithin or selenocystein
SQVSPFKIPIEELDDRVFVNCNTSIYRASSLSNCRHTSSVXE

SEQ ID NO: 1430 - protein, 42 aa, Artificial Sequence
  chemically synthesized
SQVSPFKIPIEELDDRVFVNCNTSIYRASSLSNCRHTSSVED

SEQ ID NO: 1431 - protein, 42 aa, Artificial Sequence
  chemically synthesized
  misc_feature (42)..(42): Xaa can be a proteinogenic, non-proteinogenic or synthetic amino acid like ornithin or selenocystein
SQVSPFKIPIEELDDRVFVNCNTSIYRASSLSNCRHTSSVEX

SEQ ID NO: 1432 - protein, 42 aa, Artificial Sequence
  chemically synthesized
SQVSAFKIPIEELDDRVFVNCNTSIYRASSLSNCRHTSSVEE

SEQ ID NO: 1433 - protein, 42 aa, Artificial Sequence
  chemically synthesized
SQVSGFKIPIEELDDRVFVNCNTSIYRASSLSNCRHTSSVEE

SEQ ID NO: 1434 - protein, 42 aa, Artificial Sequence
  chemically synthesized
SQVSPFKIAIEELDDRVFVNCNTSIYRASSLSNCRHTSSVEE

SEQ ID NO: 1435 - protein, 42 aa, Artificial Sequence
  chemically synthesized
SQVSPFKIGIEELDDRVFVNCNTSIYRASSLSNCRHTSSVEE

SEQ ID NO: 1436 - protein, 42 aa, Artificial Sequence; identical to SEQ ID NO: 43
  chemically synthesized

SEQ ID NO: 1437 - protein, 42 aa, Artificial Sequence; identical to SEQ ID NO: 162
  chemically synthesized

SEQ ID NO: 1438 - protein, 42 aa, Artificial Sequence
  chemically synthesized
YQVSPFKIPIEELEDKVFVNCNTSIYRASSLSNCRHTSSVEE

SEQ ID NO: 1439 - protein, 42 aa, Artificial Sequence; identical to SEQ ID NO: 282
  chemically synthesized

SEQ ID NO: 1440 - protein, 42 aa, Artificial Sequence; identical to SEQ ID NO: 400
  chemically synthesized

SEQ ID NO: 1441 - protein, 42 aa, Artificial Sequence
  chemically synthesized
SQISPFKIPIEELEDKVFVNCNTSIYRASSLSNCRHTSSVEE

SEQ ID NO: 1442 - protein, 42 aa, Artificial Sequence
  chemically synthesized
SQPSPFKIPIEELEDKVFVNCNTSIYRASSLSNCRHTSSVEE

SEQ ID NO: 1443 - protein, 42 aa, Artificial Sequence
  chemically synthesized
SQFSPFKIPIEELEDKVFVNCNTSIYRASSLSNCRHTSSVEE

SEQ ID NO: 1444 - protein, 42 aa, Artificial Sequence; identical to SEQ ID NO: 519
  chemically synthesized

SEQ ID NO: 1445 - protein, 42 aa, Artificial Sequence
  chemically synthesized
SQVYPFKIPIEELEDKVFVNCNTSIYRASSLSNCRHTSSVEE

SEQ ID NO: 1446 - protein, 42 aa, Artificial Sequence
  chemically synthesized
SQVSPWKIPIEELEDKVFVNCNTSIYRASSLSNCRHTSSVEE

SEQ ID NO: 1447 - protein, 42 aa, Artificial Sequence
  chemically synthesized
SQVSPYKIPIEELEDKVFVNCNTSIYRASSLSNCRHTSSVEE

SEQ ID NO: 1448 - protein, 42 aa, Artificial Sequence
  chemically synthesized
SQVSPHKIPIEELEDKVFVNCNTSIYRASSLSNCRHTSSVEE

SEQ ID NO: 1449 - protein, 42 aa, Artificial Sequence
  chemically synthesized
SQVSPFRIPIEELEDKVFVNCNTSIYRASSLSNCRHTSSVEE

SEQ ID NO: 1450 - protein, 42 aa, Artificial Sequence
  chemically synthesized
SQVSPFHIPIEELEDKVFVNCNTSIYRASSLSNCRHTSSVEE

SEQ ID NO: 1451 - protein, 42 aa, Artificial Sequence
  chemically synthesized
  misc_feature (7)..(7): Xaa can be a proteinogenic, non-proteinogenic or synthetic amino acid like ornithin or selenocystein
SQVSPFXIPIEELEDKVFVNCNTSIYRASSLSNCRHTSSVEE

SEQ ID NO: 1452 - protein, 42 aa, Artificial Sequence; identical to SEQ ID NO: 758
  chemically synthesized

SEQ ID NO: 1453 - protein, 42 aa, Artificial Sequence
  chemically synthesized
SQVSPFKHPIEELEDKVFVNCNTSIYRASSLSNCRHTSSVEE

SEQ ID NO: 1454 - protein, 42 aa, Artificial Sequence
  chemically synthesized
SQVSPFKVPIEELEDKVFVNCNTSIYRASSLSNCRHTSSVEE

SEQ ID NO: 1455 - protein, 42 aa, Artificial Sequence
  chemically synthesized
SQVSPFKFPIEELEDKVFVNCNTSIYRASSLSNCRHTSSVEE

SEQ ID NO: 1456 - protein, 42 aa, Artificial Sequence
  chemically synthesized
SQVSPFKMPIEELEDKVFVNCNTSIYRASSLSNCRHTSSVEE

SEQ ID NO: 1457 - protein, 42 aa, Artificial Sequence; identical to SEQ ID NO: 876
  chemically synthesized

SEQ ID NO: 1458 - protein, 42 aa, Artificial Sequence
  chemically synthesized
SQVSPFKIPHEELEDKVFVNCNTSIYRASSLSNCRHTSSVEE

SEQ ID NO: 1459 - protein, 42 aa, Artificial Sequence
  chemically synthesized
SQVSPFKIPVEELEDKVFVNCNTSIYRASSLSNCRHTSSVEE

SEQ ID NO: 1460 - protein, 42 aa, Artificial Sequence
  chemically synthesized
SQVSPFKIPFEELEDKVFVNCNTSIYRASSLSNCRHTSSVEE

SEQ ID NO: 1461 - protein, 42 aa, Artificial Sequence
  chemically synthesized
SQVSPFKIPMEELEDKVFVNCNTSIYRASSLSNCRHTSSVEE

SEQ ID NO: 1462 - protein, 42 aa, Artificial Sequence; identical to SEQ ID NO: 996
  chemically synthesized

SEQ ID NO: 1463 - protein, 42 aa, Artificial Sequence
  chemically synthesized
  misc_feature (11)..(11): Xaa can be a proteinogenic, non-proteinogenic or synthetic amino acid like ornithin or selenocystein
SQVSPFKIPIXELEDKVFVNCNTSIYRASSLSNCRHTSSVEE

SEQ ID NO: 1464 - protein, 42 aa, Artificial Sequence; identical to SEQ ID NO: 1116
  chemically synthesized

SEQ ID NO: 1465 - protein, 42 aa, Artificial Sequence
  chemically synthesized
  misc_feature (12)..(12): Xaa can be a proteinogenic, non-proteinogenic or synthetic amino acid like ornithin or selenocystein
SQVSPFKIPIEXLEDKVFVNCNTSIYRASSLSNCRHTSSVEE

SEQ ID NO: 1466 - protein, 42 aa, Artificial Sequence
  chemically synthesized
SQVSPFKIPIEEVEDKVFVNCNTSIYRASSLSNCRHTSSVEE

SEQ ID NO: 1467 - protein, 42 aa, Artificial Sequence; identical to SEQ ID NO: 1233
  chemically synthesized

SEQ ID NO: 1468 - protein, 42 aa, Artificial Sequence
  chemically synthesized
SQVSPFKIPIEEFEDKVFVNCNTSIYRASSLSNCRHTSSVEE

SEQ ID NO: 1469 - protein, 42 aa, Artificial Sequence
  chemically synthesized
SQVSPFKIPIEEHEDKVFVNCNTSIYRASSLSNCRHTSSVEE

SEQ ID NO: 1470 - protein, 42 aa, Artificial Sequence
  chemically synthesized
SQVSPFKIPIEEMEDKVFVNCNTSIYRASSLSNCRHTSSVEE

SEQ ID NO: 1471 - protein, 42 aa, Artificial Sequence; identical to SEQ ID NO: 1353
  chemically synthesized

SEQ ID NO: 1472 - protein, 42 aa, Artificial Sequence
  chemically synthesized
  misc_feature (14)..(14): Xaa can be a proteinogenic, non-proteinogenic or synthetic amino acid like ornithin or selenocystein
SQVSPFKIPIEELXDKVFVNCNTSIYRASSLSNCRHTSSVEE

SEQ ID NO: 1473 - protein, 42 aa, Artificial Sequence
  chemically synthesized
  misc_feature (15)..(15): Xaa can be a proteinogenic, non-proteinogenic or synthetic amino acid like ornithin or selenocystein
SQVSPFKIPIEELEXKVFVNCNTSIYRASSLSNCRHTSSVEE

SEQ ID NO: 1474 - protein, 42 aa, Artificial Sequence
  chemically synthesized
SQVSPFKIPIEELEEKVFVNCNTSIYRASSLSNCRHTSSVEE

SEQ ID NO: 1475 - protein, 42 aa, Artificial Sequence
  chemically synthesized
SQVSPFKIPIEELEDKIFVNCNTSIYRASSLSNCRHTSSVEE

SEQ ID NO: 1476 - protein, 42 aa, Artificial Sequence
  chemically synthesized
SQVSPFKIPIEELEDKLFVNCNTSIYRASSLSNCRHTSSVEE

SEQ ID NO: 1477 - protein, 42 aa, Artificial Sequence
  chemically synthesized
SQVSPFKIPIEELEDKFFVNCNTSIYRASSLSNCRHTSSVEE

SEQ ID NO: 1478 - protein, 42 aa, Artificial Sequence
  chemically synthesized
SQVSPFKIPIEELEDKHFVNCNTSIYRASSLSNCRHTSSVEE

SEQ ID NO: 1479 - protein, 42 aa, Artificial Sequence
  chemically synthesized
SQVSPFKIPIEELEDKMFVNCNTSIYRASSLSNCRHTSSVEE

SEQ ID NO: 1480 - protein, 42 aa, Artificial Sequence
  chemically synthesized
SQVSPFKIPIEELEDKVIVNCNTSIYRASSLSNCRHTSSVEE

SEQ ID NO: 1481 - protein, 42 aa, Artificial Sequence
  chemically synthesized
SQVSPFKIPIEELEDKVLVNCNTSIYRASSLSNCRHTSSVEE

SEQ ID NO: 1482 - protein, 42 aa, Artificial Sequence
  chemically synthesized
SQVSPFKIPIEELEDKVVVNCNTSIYRASSLSNCRHTSSVEE

SEQ ID NO: 1483 - protein, 42 aa, Artificial Sequence
  chemically synthesized
SQVSPFKIPIEELEDKVHVNCNTSIYRASSLSNCRHTSSVEE

SEQ ID NO: 1484 - protein, 42 aa, Artificial Sequence
  chemically synthesized
SQVSPFKIPIEELEDKVMVNCNTSIYRASSLSNCRHTSSVEE

SEQ ID NO: 1485 - protein, 42 aa, Artificial Sequence
  chemically synthesized
SQVSPFKIPIEELEDKVFINCNTSIYRASSLSNCRHTSSVEE

SEQ ID NO: 1486 - protein, 42 aa, Artificial Sequence
  chemically synthesized
SQVSPFKIPIEELEDKVFLNCNTSIYRASSLSNCRHTSSVEE

SEQ ID NO: 1487 - protein, 42 aa, Artificial Sequence
  chemically synthesized
SQVSPFKIPIEELEDKVFFNCNTSIYRASSLSNCRHTSSVEE

SEQ ID NO: 1488 - protein, 42 aa, Artificial Sequence
  chemically synthesized
SQVSPFKIPIEELEDKVFHNCNTSIYRASSLSNCRHTSSVEE

SEQ ID NO: 1489 - protein, 42 aa, Artificial Sequence
  chemically synthesized
SQVSPFKIPIEELEDKVFMNCNTSIYRASSLSNCRHTSSVEE

SEQ ID NO: 1490 - protein, 42 aa, Artificial Sequence
  chemically synthesized
SQVSPFKIPIEELEDKVFVQCNTSIYRASSLSNCRHTSSVEE

SEQ ID NO: 1491 - protein, 42 aa, Artificial Sequence
  chemically synthesized
SQVSPFKIPIEELEDKVFVNSNTSIYRASSLSNCRHTSSVEE

SEQ ID NO: 1492 - protein, 42 aa, Artificial Sequence
  chemically synthesized
SQVSPFKIPIEELEDKVFVNGNTSIYRASSLSNCRHTSSVEE

SEQ ID NO: 1493 - protein, 42 aa, Artificial Sequence
  chemically synthesized
SQVSPFKIPIEELEDKVFVNANTSIYRASSLSNCRHTSSVEE

SEQ ID NO: 1494 - protein, 42 aa, Artificial Sequence
  chemically synthesized
SQVSPFKIPIEELEDKVFVNCQTSIYRASSLSNCRHTSSVEE

SEQ ID NO: 1495 - protein, 42 aa, Artificial Sequence
  chemically synthesized
SQVSPFKIPIEELEDKVFVNCNSSIYRASSLSNCRHTSSVEE

SEQ ID NO: 1496 - protein, 42 aa, Artificial Sequence
  chemically synthesized
SQVSPFKIPIEELEDKVFVNCNYSIYRASSLSNCRHTSSVEE

SEQ ID NO: 1497 - protein, 42 aa, Artificial Sequence
  chemically synthesized
SQVSPFKIPIEELEDKVFVNCNTTIYRASSLSNCRHTSSVEE

SEQ ID NO: 1498 - protein, 42 aa, Artificial Sequence
  chemically synthesized
SQVSPFKIPIEELEDKVFVNCNTYIYRASSLSNCRHTSSVEE

SEQ ID NO: 1499 - protein, 42 aa, Artificial Sequence
  chemically synthesized
SQVSPFKIPIEELEDKVFVNCNTSVYRASSLSNCRHTSSVEE

SEQ ID NO: 1500 - protein, 42 aa, Artificial Sequence
  chemically synthesized
SQVSPFKIPIEELEDKVFVNCNTSLYRASSLSNCRHTSSVEE

SEQ ID NO: 1501 - protein, 42 aa, Artificial Sequence
  chemically synthesized
SQVSPFKIPIEELEDKVFVNCNTSHYRASSLSNCRHTSSVEE

SEQ ID NO: 1502 - protein, 42 aa, Artificial Sequence
  chemically synthesized
SQVSPFKIPIEELEDKVFVNCNTSFYRASSLSNCRHTSSVEE

SEQ ID NO: 1503 - protein, 42 aa, Artificial Sequence
  chemically synthesized
SQVSPFKIPIEELEDKVFVNCNTSMYRASSLSNCRHTSSVEE

SEQ ID NO: 1504 - protein, 42 aa, Artificial Sequence
  chemically synthesized
SQVSPFKIPIEELEDKVFVNCNTSIWRASSLSNCRHTSSVEE

SEQ ID NO: 1505 - protein, 42 aa, Artificial Sequence
  chemically synthesized
SQVSPFKIPIEELEDKVFVNCNTSIFRASSLSNCRHTSSVEE

SEQ ID NO: 1506 - protein, 42 aa, Artificial Sequence
  chemically synthesized
SQVSPFKIPIEELEDKVFVNCNTSISRASSLSNCRHTSSVEE

SEQ ID NO: 1507 - protein, 42 aa, Artificial Sequence
  chemically synthesized
SQVSPFKIPIEELEDKVFVNCNTSITRASSLSNCRHTSSVEE

SEQ ID NO: 1508 - protein, 42 aa, Artificial Sequence
  chemically synthesized
  misc_feature (27)..(27): Xaa can be a proteinogenic, non-proteinogenic or synthetic amino acid like ornithin or selenocystein
SQVSPFKIPIEELEDKVFVNCNTSIYXASSLSNCRHTSSVEE

SEQ ID NO: 1509 - protein, 42 aa, Artificial Sequence
  chemically synthesized
SQVSPFKIPIEELEDKVFVNCNTSIYHASSLSNCRHTSSVEE

SEQ ID NO: 1510 - protein, 42 aa, Artificial Sequence
  chemically synthesized
SQVSPFKIPIEELEDKVFVNCNTSIYKASSLSNCRHTSSVEE

SEQ ID NO: 1511 - protein, 42 aa, Artificial Sequence
  chemically synthesized
SQVSPFKIPIEELEDKVFVNCNTSIYRGSSLSNCRHTSSVEE

SEQ ID NO: 1512 - protein, 42 aa, Artificial Sequence
  chemically synthesized
SQVSPFKIPIEELEDKVFVNCNTSIYRATSLSNCRHTSSVEE

SEQ ID NO: 1513 - protein, 42 aa, Artificial Sequence
  chemically synthesized
SQVSPFKIPIEELEDKVFVNCNTSIYRAYSLSNCRHTSSVEE

SEQ ID NO: 1514 - protein, 42 aa, Artificial Sequence
  chemically synthesized
SQVSPFKIPIEELEDKVFVNCNTSIYRASTLSNCRHTSSVEE

SEQ ID NO: 1515 - protein, 42 aa, Artificial Sequence
  chemically synthesized
SQVSPFKIPIEELEDKVFVNCNTSIYRASYLSNCRHTSSVEE

SEQ ID NO: 1516 - protein, 42 aa, Artificial Sequence
  chemically synthesized
SQVSPFKIPIEELEDKVFVNCNTSIYRASSISNCRHTSSVEE

SEQ ID NO: 1517 - protein, 42 aa, Artificial Sequence
  chemically synthesized
SQVSPFKIPIEELEDKVFVNCNTSIYRASSVSNCRHTSSVEE

SEQ ID NO: 1518 - protein, 42 aa, Artificial Sequence
  chemically synthesized
SQVSPFKIPIEELEDKVFVNCNTSIYRASSFSNCRHTSSVEE

SEQ ID NO: 1519 - protein, 42 aa, Artificial Sequence
  chemically synthesized
SQVSPFKIPIEELEDKVFVNCNTSIYRASSMSNCRHTSSVEE

SEQ ID NO: 1520 - protein, 42 aa, Artificial Sequence
  chemically synthesized
SQVSPFKIPIEELEDKVFVNCNTSIYRASSHSNCRHTSSVEE

SEQ ID NO: 1521 - protein, 42 aa, Artificial Sequence
  chemically synthesized
SQVSPFKIPIEELEDKVFVNCNTSIYRASSLTNCRHTSSVEE

SEQ ID NO: 1522 - protein, 42 aa, Artificial Sequence
  chemically synthesized
SQVSPFKIPIEELEDKVFVNCNTSIYRASSLYNCRHTSSVEE

SEQ ID NO: 1523 - protein, 42 aa, Artificial Sequence
  chemically synthesized
SQVSPFKIPIEELEDKVFVNCNTSIYRASSLSQCRHTSSVEE

SEQ ID NO: 1524 - protein, 42 aa, Artificial Sequence
  chemically synthesized
SQVSPFKIPIEELEDKVFVNCNTSIYRASSLSNSRHTSSVEE

SEQ ID NO: 1525 - protein, 42 aa, Artificial Sequence
  chemically synthesized
SQVSPFKIPIEELEDKVFVNCNTSIYRASSLSNGRHTSSVEE

SEQ ID NO: 1526 - protein, 42 aa, Artificial Sequence
  chemically synthesized
SQVSPFKIPIEELEDKVFVNCNTSIYRASSLSNARHTSSVEE

SEQ ID NO: 1527 - protein, 42 aa, Artificial Sequence
  chemically synthesized
  misc_feature (35)..(35): Xaa can be a proteinogenic, non-proteinogenic or synthetic amino acid like ornithin or selenocystein
SQVSPFKIPIEELEDKVFVNCNTSIYRASSLSNCXHTSSVEE

SEQ ID NO: 1528 - protein, 42 aa, Artificial Sequence
  chemically synthesized
SQVSPFKIPIEELEDKVFVNCNTSIYRASSLSNCHHTSSVEE

SEQ ID NO: 1529 - protein, 42 aa, Artificial Sequence
  chemically synthesized
SQVSPFKIPIEELEDKVFVNCNTSIYRASSLSNCKHTSSVEE

SEQ ID NO: 1530 - protein, 42 aa, Artificial Sequence
  chemically synthesized
SQVSPFKIPIEELEDKVFVNCNTSIYRASSLSNCRGTSSVEE

SEQ ID NO: 1531 - protein, 42 aa, Artificial Sequence
  chemically synthesized
SQVSPFKIPIEELEDKVFVNCNTSIYRASSLSNCRATSSVEE

SEQ ID NO: 1532 - protein, 42 aa, Artificial Sequence
  chemically synthesized
SQVSPFKIPIEELEDKVFVNCNTSIYRASSLSNCRITSSVEE

SEQ ID NO: 1533 - protein, 42 aa, Artificial Sequence
  chemically synthesized
SQVSPFKIPIEELEDKVFVNCNTSIYRASSLSNCRLTSSVEE

SEQ ID NO: 1534 - protein, 42 aa, Artificial Sequence
  chemically synthesized
SQVSPFKIPIEELEDKVFVNCNTSIYRASSLSNCRMTSSVEE

SEQ ID NO: 1535 - protein, 42 aa, Artificial Sequence
  chemically synthesized
SQVSPFKIPIEELEDKVFVNCNTSIYRASSLSNCRVTSSVEE

SEQ ID NO: 1536 - protein, 42 aa, Artificial Sequence
  chemically synthesized
SQVSPFKIPIEELEDKVFVNCNTSIYRASSLSNCRHSSSVEE

SEQ ID NO: 1537 - protein, 42 aa, Artificial Sequence
  chemically synthesized
SQVSPFKIPIEELEDKVFVNCNTSIYRASSLSNCRHYSSVEE

SEQ ID NO: 1538 - protein, 42 aa, Artificial Sequence
  chemically synthesized
SQVSPFKIPIEELEDKVFVNCNTSIYRASSLSNCRHTTSVEE

SEQ ID NO: 1539 - protein, 42 aa, Artificial Sequence
  chemically synthesized
SQVSPFKIPIEELEDKVFVNCNTSIYRASSLSNCRHTYSVEE

SEQ ID NO: 1540 - protein, 42 aa, Artificial Sequence
  chemically synthesized
SQVSPFKIPIEELEDKVFVNCNTSIYRASSLSNCRHTSTVEE

SEQ ID NO: 1541 - protein, 42 aa, Artificial Sequence
  chemically synthesized
SQVSPFKIPIEELEDKVFVNCNTSIYRASSLSNCRHTSYVEE

SEQ ID NO: 1542 - protein, 42 aa, Artificial Sequence
  chemically synthesized
SQVSPFKIPIEELEDKVFVNCNTSIYRASSLSNCRHTSSIEE

SEQ ID NO: 1543 - protein, 42 aa, Artificial Sequence
  chemically synthesized
SQVSPFKIPIEELEDKVFVNCNTSIYRASSLSNCRHTSSLEE

SEQ ID NO: 1544 - protein, 42 aa, Artificial Sequence
  chemically synthesized
SQVSPFKIPIEELEDKVFVNCNTSIYRASSLSNCRHTSSFEE

SEQ ID NO: 1545 - protein, 42 aa, Artificial Sequence
  chemically synthesized
SQVSPFKIPIEELEDKVFVNCNTSIYRASSLSNCRHTSSHEE

SEQ ID NO: 1546 - protein, 42 aa, Artificial Sequence
  chemically synthesized
SQVSPFKIPIEELEDKVFVNCNTSIYRASSLSNCRHTSSMEE

SEQ ID NO: 1547 - protein, 42 aa, Artificial Sequence
  chemically synthesized
SQVSPFKIPIEELEDKVFVNCNTSIYRASSLSNCRHTSSVDE

SEQ ID NO: 1548 - protein, 42 aa, Artificial Sequence
  chemically synthesized
  misc_feature (41)..(41): Xaa can be a proteinogenic, non-proteinogenic or synthetic amino acid like ornithin or selenocystein
SQVSPFKIPIEELEDKVFVNCNTSIYRASSLSNCRHTSSVXE

SEQ ID NO: 1549 - protein, 42 aa, Artificial Sequence
  chemically synthesized
SQVSPFKIPIEELEDKVFVNCNTSIYRASSLSNCRHTSSVED

SEQ ID NO: 1550 - protein, 42 aa, Artificial Sequence
  chemically synthesized
  misc_feature (42)..(42): Xaa can be a proteinogenic, non-proteinogenic or synthetic amino acid like ornithin or selenocystein
SQVSPFKIPIEELEDKVFVNCNTSIYRASSLSNCRHTSSVEX

SEQ ID NO: 1551 - protein, 42 aa, Artificial Sequence
  chemically synthesized
SQVSAFKIPIEELEDKVFVNCNTSIYRASSLSNCRHTSSVEE

SEQ ID NO: 1552 - protein, 42 aa, Artificial Sequence
  chemically synthesized
SQVSGFKIPIEELEDKVFVNCNTSIYRASSLSNCRHTSSVEE

SEQ ID NO: 1553 - protein, 42 aa, Artificial Sequence
  chemically synthesized
SQVSPFKIAIEELEDKVFVNCNTSIYRASSLSNCRHTSSVEE

SEQ ID NO: 1554 - protein, 42 aa, Artificial Sequence
  chemically synthesized
SQVSPFKIGIEELEDKVFVNCNTSIYRASSLSNCRHTSSVEE

SEQ ID NO: 1555 - protein, 42 aa, Artificial Sequence; identical to SEQ ID NO: 46
  chemically synthesized

SEQ ID NO: 1556 - protein, 42 aa, Artificial Sequence; identical to SEQ ID NO: 165
  chemically synthesized

SEQ ID NO: 1557 - protein, 42 aa, Artificial Sequence
  chemically synthesized
YQVSPFKIPIEELEDRIFVNCNTSIYRASSLSNCRHTSSVEE

SEQ ID NO: 1558 - protein, 42 aa, Artificial Sequence; identical to SEQ ID NO: 285
  chemically synthesized

SEQ ID NO: 1559 - protein, 42 aa, Artificial Sequence; identical to SEQ ID NO: 403
  chemically synthesized

SEQ ID NO: 1560 - protein, 42 aa, Artificial Sequence
  chemically synthesized
SQISPFKIPIEELEDRIFVNCNTSIYRASSLSNCRHTSSVEE

SEQ ID NO: 1561 - protein, 42 aa, Artificial Sequence
  chemically synthesized
SQPSPFKIPIEELEDRIFVNCNTSIYRASSLSNCRHTSSVEE

SEQ ID NO: 1562 - protein, 42 aa, Artificial Sequence
  chemically synthesized
SQFSPFKIPIEELEDRIFVNCNTSIYRASSLSNCRHTSSVEE

SEQ ID NO: 1563 - protein, 42 aa, Artificial Sequence; identical to SEQ ID NO: 522
  chemically synthesized

SEQ ID NO: 1564 - protein, 42 aa, Artificial Sequence
  chemically synthesized
SQVYPFKIPIEELEDRIFVNCNTSIYRASSLSNCRHTSSVEE

SEQ ID NO: 1565 - protein, 42 aa, Artificial Sequence
  chemically synthesized
SQVSPWKIPIEELEDRIFVNCNTSIYRASSLSNCRHTSSVEE

SEQ ID NO: 1566 - protein, 42 aa, Artificial Sequence
  chemically synthesized
SQVSPYKIPIEELEDRIFVNCNTSIYRASSLSNCRHTSSVEE

SEQ ID NO: 1567 - protein, 42 aa, Artificial Sequence
  chemically synthesized
SQVSPHKIPIEELEDRIFVNCNTSIYRASSLSNCRHTSSVEE

SEQ ID NO: 1568 - protein, 42 aa, Artificial Sequence
  chemically synthesized
SQVSPFRIPIEELEDRIFVNCNTSIYRASSLSNCRHTSSVEE

SEQ ID NO: 1569 - protein, 42 aa, Artificial Sequence
  chemically synthesized
SQVSPFHIPIEELEDRIFVNCNTSIYRASSLSNCRHTSSVEE

SEQ ID NO: 1570 - protein, 42 aa, Artificial Sequence
  chemically synthesized
  misc_feature (7)..(7): Xaa can be a proteinogenic, non-proteinogenic or synthetic amino acid like ornithin or selenocystein
SQVSPFXIPIEELEDRIFVNCNTSIYRASSLSNCRHTSSVEE

SEQ ID NO: 1571 - protein, 42 aa, Artificial Sequence; identical to SEQ ID NO: 761
  chemically synthesized

SEQ ID NO: 1572 - protein, 42 aa, Artificial Sequence
  chemically synthesized
SQVSPFKHPIEELEDRIFVNCNTSIYRASSLSNCRHTSSVEE

SEQ ID NO: 1573 - protein, 42 aa, Artificial Sequence
  chemically synthesized
SQVSPFKVPIEELEDRIFVNCNTSIYRASSLSNCRHTSSVEE

SEQ ID NO: 1574 - protein, 42 aa, Artificial Sequence
  chemically synthesized
SQVSPFKFPIEELEDRIFVNCNTSIYRASSLSNCRHTSSVEE

SEQ ID NO: 1575 - protein, 42 aa, Artificial Sequence
  chemically synthesized
SQVSPFKMPIEELEDRIFVNCNTSIYRASSLSNCRHTSSVEE

SEQ ID NO: 1576 - protein, 42 aa, Artificial Sequence; identical to SEQ ID NO: 879
  chemically synthesized

SEQ ID NO: 1577 - protein, 42 aa, Artificial Sequence
  chemically synthesized
SQVSPFKIPHEELEDRIFVNCNTSIYRASSLSNCRHTSSVEE

SEQ ID NO: 1578 - protein, 42 aa, Artificial Sequence
  chemically synthesized
SQVSPFKIPVEELEDRIFVNCNTSIYRASSLSNCRHTSSVEE

SEQ ID NO: 1579 - protein, 42 aa, Artificial Sequence
  chemically synthesized
SQVSPFKIPFEELEDRIFVNCNTSIYRASSLSNCRHTSSVEE

SEQ ID NO: 1580 - protein, 42 aa, Artificial Sequence
  chemically synthesized
SQVSPFKIPMEELEDRIFVNCNTSIYRASSLSNCRHTSSVEE

SEQ ID NO: 1581 - protein, 42 aa, Artificial Sequence; identical to SEQ ID NO: 999
  chemically synthesized

SEQ ID NO: 1582 - protein, 42 aa, Artificial Sequence
  chemically synthesized
  misc_feature (11)..(11): Xaa can be a proteinogenic, non-proteinogenic or synthetic amino acid like ornithin or selenocystein
SQVSPFKIPIXELEDRIFVNCNTSIYRASSLSNCRHTSSVEE

SEQ ID NO: 1583 - protein, 42 aa, Artificial Sequence; identical to SEQ ID NO: 1119
  chemically synthesized

SEQ ID NO: 1584 - protein, 42 aa, Artificial Sequence
  chemically synthesized
  misc_feature (12)..(12): Xaa can be a proteinogenic, non-proteinogenic or synthetic amino acid like ornithin or selenocystein
SQVSPFKIPIEXLEDRIFVNCNTSIYRASSLSNCRHTSSVEE

SEQ ID NO: 1585 - protein, 42 aa, Artificial Sequence
  chemically synthesized
SQVSPFKIPIEEVEDRIFVNCNTSIYRASSLSNCRHTSSVEE

SEQ ID NO: 1586 - protein, 42 aa, Artificial Sequence; identical to SEQ ID NO: 1236
  chemically synthesized

SEQ ID NO: 1587 - protein, 42 aa, Artificial Sequence
  chemically synthesized
SQVSPFKIPIEEFEDRIFVNCNTSIYRASSLSNCRHTSSVEE

SEQ ID NO: 1588 - protein, 42 aa, Artificial Sequence
  chemically synthesized
SQVSPFKIPIEEHEDRIFVNCNTSIYRASSLSNCRHTSSVEE

SEQ ID NO: 1589 - protein, 42 aa, Artificial Sequence
  chemically synthesized
SQVSPFKIPIEEMEDRIFVNCNTSIYRASSLSNCRHTSSVEE

SEQ ID NO: 1590 - protein, 42 aa, Artificial Sequence; identical to SEQ ID NO: 1356
  chemically synthesized

SEQ ID NO: 1591 - protein, 42 aa, Artificial Sequence
  chemically synthesized
  misc_feature (14)..(14): Xaa can be a proteinogenic, non-proteinogenic or synthetic amino acid like ornithin or selenocystein
SQVSPFKIPIEELXDRIFVNCNTSIYRASSLSNCRHTSSVEE

SEQ ID NO: 1592 - protein, 42 aa, Artificial Sequence
  chemically synthesized
  misc_feature (15)..(15): Xaa can be a proteinogenic, non-proteinogenic or synthetic amino acid like ornithin or selenocystein
SQVSPFKIPIEELEXRIFVNCNTSIYRASSLSNCRHTSSVEE

SEQ ID NO: 1593 - protein, 42 aa, Artificial Sequence
  chemically synthesized
SQVSPFKIPIEELEERIFVNCNTSIYRASSLSNCRHTSSVEE

SEQ ID NO: 1594 - protein, 42 aa, Artificial Sequence; identical to SEQ ID NO: 1475
  chemically synthesized

SEQ ID NO: 1595 - protein, 42 aa, Artificial Sequence
  chemically synthesized
SQVSPFKIPIEELEDHIFVNCNTSIYRASSLSNCRHTSSVEE

SEQ ID NO: 1596 - protein, 42 aa, Artificial Sequence
  chemically synthesized
  misc_feature (16)..(16): Xaa can be a proteinogenic, non-proteinogenic or synthetic amino acid like ornithin or selenocystein
SQVSPFKIPIEELEDXIFVNCNTSIYRASSLSNCRHTSSVEE

SEQ ID NO: 1597 - protein, 42 aa, Artificial Sequence
  chemically synthesized
SQVSPFKIPIEELEDRIIVNCNTSIYRASSLSNCRHTSSVEE

SEQ ID NO: 1598 - protein, 42 aa, Artificial Sequence
  chemically synthesized
SQVSPFKIPIEELEDRILVNCNTSIYRASSLSNCRHTSSVEE

SEQ ID NO: 1599 - protein, 42 aa, Artificial Sequence
  chemically synthesized
SQVSPFKIPIEELEDRIVVNCNTSIYRASSLSNCRHTSSVEE

SEQ ID NO: 1600 - protein, 42 aa, Artificial Sequence
  chemically synthesized
SQVSPFKIPIEELEDRIHVNCNTSIYRASSLSNCRHTSSVEE

SEQ ID NO: 1601 - protein, 42 aa, Artificial Sequence
  chemically synthesized
SQVSPFKIPIEELEDRIMVNCNTSIYRASSLSNCRHTSSVEE

SEQ ID NO: 1602 - protein, 42 aa, Artificial Sequence
  chemically synthesized
SQVSPFKIPIEELEDRIFINCNTSIYRASSLSNCRHTSSVEE

SEQ ID NO: 1603 - protein, 42 aa, Artificial Sequence
  chemically synthesized
SQVSPFKIPIEELEDRIFLNCNTSIYRASSLSNCRHTSSVEE

SEQ ID NO: 1604 - protein, 42 aa, Artificial Sequence
  chemically synthesized
SQVSPFKIPIEELEDRIFFNCNTSIYRASSLSNCRHTSSVEE

SEQ ID NO: 1605 - protein, 42 aa, Artificial Sequence
  chemically synthesized
SQVSPFKIPIEELEDRIFHNCNTSIYRASSLSNCRHTSSVEE

SEQ ID NO: 1606 - protein, 42 aa, Artificial Sequence
  chemically synthesized
SQVSPFKIPIEELEDRIFMNCNTSIYRASSLSNCRHTSSVEE

SEQ ID NO: 1607 - protein, 42 aa, Artificial Sequence
  chemically synthesized
SQVSPFKIPIEELEDRIFVQCNTSIYRASSLSNCRHTSSVEE

SEQ ID NO: 1608 - protein, 42 aa, Artificial Sequence
  chemically synthesized
SQVSPFKIPIEELEDRIFVNSNTSIYRASSLSNCRHTSSVEE

SEQ ID NO: 1609 - protein, 42 aa, Artificial Sequence
  chemically synthesized
SQVSPFKIPIEELEDRIFVNGNTSIYRASSLSNCRHTSSVEE

SEQ ID NO: 1610 - protein, 42 aa, Artificial Sequence
  chemically synthesized
SQVSPFKIPIEELEDRIFVNANTSIYRASSLSNCRHTSSVEE

SEQ ID NO: 1611 - protein, 42 aa, Artificial Sequence
  chemically synthesized
SQVSPFKIPIEELEDRIFVNCQTSIYRASSLSNCRHTSSVEE

SEQ ID NO: 1612 - protein, 42 aa, Artificial Sequence
  chemically synthesized
SQVSPFKIPIEELEDRIFVNCNSSIYRASSLSNCRHTSSVEE

SEQ ID NO: 1613 - protein, 42 aa, Artificial Sequence
  chemically synthesized
SQVSPFKIPIEELEDRIFVNCNYSIYRASSLSNCRHTSSVEE

SEQ ID NO: 1614 - protein, 42 aa, Artificial Sequence
  chemically synthesized
SQVSPFKIPIEELEDRIFVNCNTTIYRASSLSNCRHTSSVEE

SEQ ID NO: 1615 - protein, 42 aa, Artificial Sequence
  chemically synthesized
SQVSPFKIPIEELEDRIFVNCNTYIYRASSLSNCRHTSSVEE

SEQ ID NO: 1616 - protein, 42 aa, Artificial Sequence
  chemically synthesized
SQVSPFKIPIEELEDRIFVNCNTSVYRASSLSNCRHTSSVEE

SEQ ID NO: 1617 - protein, 42 aa, Artificial Sequence
  chemically synthesized
SQVSPFKIPIEELEDRIFVNCNTSLYRASSLSNCRHTSSVEE

SEQ ID NO: 1618 - protein, 42 aa, Artificial Sequence
  chemically synthesized
SQVSPFKIPIEELEDRIFVNCNTSHYRASSLSNCRHTSSVEE

SEQ ID NO: 1619 - protein, 42 aa, Artificial Sequence
  chemically synthesized
SQVSPFKIPIEELEDRIFVNCNTSFYRASSLSNCRHTSSVEE

SEQ ID NO: 1620 - protein, 42 aa, Artificial Sequence
  chemically synthesized
SQVSPFKIPIEELEDRIFVNCNTSMYRASSLSNCRHTSSVEE

SEQ ID NO: 1621 - protein, 42 aa, Artificial Sequence
  chemically synthesized
SQVSPFKIPIEELEDRIFVNCNTSIWRASSLSNCRHTSSVEE

SEQ ID NO: 1622 - protein, 42 aa, Artificial Sequence
  chemically synthesized
SQVSPFKIPIEELEDRIFVNCNTSIFRASSLSNCRHTSSVEE

SEQ ID NO: 1623 - protein, 42 aa, Artificial Sequence
  chemically synthesized
SQVSPFKIPIEELEDRIFVNCNTSISRASSLSNCRHTSSVEE

SEQ ID NO: 1624 - protein, 42 aa, Artificial Sequence
  chemically synthesized
SQVSPFKIPIEELEDRIFVNCNTSITRASSLSNCRHTSSVEE

SEQ ID NO: 1625 - protein, 42 aa, Artificial Sequence
  chemically synthesized
  misc_feature (27)..(27): Xaa can be a proteinogenic, non-proteinogenic or synthetic amino acid like ornithin or selenocystein
SQVSPFKIPIEELEDRIFVNCNTSIYXASSLSNCRHTSSVEE

SEQ ID NO: 1626 - protein, 42 aa, Artificial Sequence
  chemically synthesized
SQVSPFKIPIEELEDRIFVNCNTSIYHASSLSNCRHTSSVEE

SEQ ID NO: 1627 - protein, 42 aa, Artificial Sequence
  chemically synthesized
SQVSPFKIPIEELEDRIFVNCNTSIYKASSLSNCRHTSSVEE

SEQ ID NO: 1628 - protein, 42 aa, Artificial Sequence
  chemically synthesized
SQVSPFKIPIEELEDRIFVNCNTSIYRGSSLSNCRHTSSVEE

SEQ ID NO: 1629 - protein, 42 aa, Artificial Sequence
  chemically synthesized
SQVSPFKIPIEELEDRIFVNCNTSIYRATSLSNCRHTSSVEE

SEQ ID NO: 1630 - protein, 42 aa, Artificial Sequence
  chemically synthesized
SQVSPFKIPIEELEDRIFVNCNTSIYRAYSLSNCRHTSSVEE

SEQ ID NO: 1631 - protein, 42 aa, Artificial Sequence
  chemically synthesized
SQVSPFKIPIEELEDRIFVNCNTSIYRASTLSNCRHTSSVEE

SEQ ID NO: 1632 - protein, 42 aa, Artificial Sequence
  chemically synthesized
SQVSPFKIPIEELEDRIFVNCNTSIYRASYLSNCRHTSSVEE

SEQ ID NO: 1633 - protein, 42 aa, Artificial Sequence
  chemically synthesized
SQVSPFKIPIEELEDRIFVNCNTSIYRASSISNCRHTSSVEE

SEQ ID NO: 1634 - protein, 42 aa, Artificial Sequence
  chemically synthesized
SQVSPFKIPIEELEDRIFVNCNTSIYRASSVSNCRHTSSVEE

SEQ ID NO: 1635 - protein, 42 aa, Artificial Sequence
  chemically synthesized
SQVSPFKIPIEELEDRIFVNCNTSIYRASSFSNCRHTSSVEE

SEQ ID NO: 1636 - protein, 42 aa, Artificial Sequence
  chemically synthesized
SQVSPFKIPIEELEDRIFVNCNTSIYRASSMSNCRHTSSVEE

SEQ ID NO: 1637 - protein, 42 aa, Artificial Sequence
  chemically synthesized
SQVSPFKIPIEELEDRIFVNCNTSIYRASSHSNCRHTSSVEE

SEQ ID NO: 1638 - protein, 42 aa, Artificial Sequence
  chemically synthesized
SQVSPFKIPIEELEDRIFVNCNTSIYRASSLTNCRHTSSVEE

SEQ ID NO: 1639 - protein, 42 aa, Artificial Sequence
  chemically synthesized
SQVSPFKIPIEELEDRIFVNCNTSIYRASSLYNCRHTSSVEE

SEQ ID NO: 1640 - protein, 42 aa, Artificial Sequence
  chemically synthesized
SQVSPFKIPIEELEDRIFVNCNTSIYRASSLSQCRHTSSVEE

SEQ ID NO: 1641 - protein, 42 aa, Artificial Sequence
  chemically synthesized
SQVSPFKIPIEELEDRIFVNCNTSIYRASSLSNSRHTSSVEE

SEQ ID NO: 1642 - protein, 42 aa, Artificial Sequence
  chemically synthesized
SQVSPFKIPIEELEDRIFVNCNTSIYRASSLSNGRHTSSVEE

SEQ ID NO: 1643 - protein, 42 aa, Artificial Sequence
  chemically synthesized
SQVSPFKIPIEELEDRIFVNCNTSIYRASSLSNARHTSSVEE

SEQ ID NO: 1644 - protein, 42 aa, Artificial Sequence
  chemically synthesized
  misc_feature (35)..(35): Xaa can be a proteinogenic, non-proteinogenic or synthetic amino acid like ornithin or selenocystein
SQVSPFKIPIEELEDRIFVNCNTSIYRASSLSNCXHTSSVEE

SEQ ID NO: 1645 - protein, 42 aa, Artificial Sequence
  chemically synthesized
SQVSPFKIPIEELEDRIFVNCNTSIYRASSLSNCHHTSSVEE

SEQ ID NO: 1646 - protein, 42 aa, Artificial Sequence
  chemically synthesized
SQVSPFKIPIEELEDRIFVNCNTSIYRASSLSNCKHTSSVEE

SEQ ID NO: 1647 - protein, 42 aa, Artificial Sequence
  chemically synthesized
SQVSPFKIPIEELEDRIFVNCNTSIYRASSLSNCRGTSSVEE

SEQ ID NO: 1648 - protein, 42 aa, Artificial Sequence
  chemically synthesized
SQVSPFKIPIEELEDRIFVNCNTSIYRASSLSNCRATSSVEE

SEQ ID NO: 1649 - protein, 42 aa, Artificial Sequence
  chemically synthesized
SQVSPFKIPIEELEDRIFVNCNTSIYRASSLSNCRITSSVEE

SEQ ID NO: 1650 - protein, 42 aa, Artificial Sequence
  chemically synthesized
SQVSPFKIPIEELEDRIFVNCNTSIYRASSLSNCRLTSSVEE

SEQ ID NO: 1651 - protein, 42 aa, Artificial Sequence
  chemically synthesized
SQVSPFKIPIEELEDRIFVNCNTSIYRASSLSNCRMTSSVEE

SEQ ID NO: 1652 - protein, 42 aa, Artificial Sequence
  chemically synthesized
SQVSPFKIPIEELEDRIFVNCNTSIYRASSLSNCRVTSSVEE

SEQ ID NO: 1653 - protein, 42 aa, Artificial Sequence
  chemically synthesized
SQVSPFKIPIEELEDRIFVNCNTSIYRASSLSNCRHSSSVEE

SEQ ID NO: 1654 - protein, 42 aa, Artificial Sequence
  chemically synthesized
SQVSPFKIPIEELEDRIFVNCNTSIYRASSLSNCRHYSSVEE

SEQ ID NO: 1655 - protein, 42 aa, Artificial Sequence
  chemically synthesized
SQVSPFKIPIEELEDRIFVNCNTSIYRASSLSNCRHTTSVEE

SEQ ID NO: 1656 - protein, 42 aa, Artificial Sequence
  chemically synthesized
SQVSPFKIPIEELEDRIFVNCNTSIYRASSLSNCRHTYSVEE

SEQ ID NO: 1657 - protein, 42 aa, Artificial Sequence
  chemically synthesized
SQVSPFKIPIEELEDRIFVNCNTSIYRASSLSNCRHTSTVEE

SEQ ID NO: 1658 - protein, 42 aa, Artificial Sequence
  chemically synthesized
SQVSPFKIPIEELEDRIFVNCNTSIYRASSLSNCRHTSYVEE

SEQ ID NO: 1659 - protein, 42 aa, Artificial Sequence
  chemically synthesized
SQVSPFKIPIEELEDRIFVNCNTSIYRASSLSNCRHTSSIEE

SEQ ID NO: 1660 - protein, 42 aa, Artificial Sequence
  chemically synthesized
SQVSPFKIPIEELEDRIFVNCNTSIYRASSLSNCRHTSSLEE

SEQ ID NO: 1661 - protein, 42 aa, Artificial Sequence
  chemically synthesized
SQVSPFKIPIEELEDRIFVNCNTSIYRASSLSNCRHTSSFEE

SEQ ID NO: 1662 - protein, 42 aa, Artificial Sequence
  chemically synthesized
SQVSPFKIPIEELEDRIFVNCNTSIYRASSLSNCRHTSSHEE

SEQ ID NO: 1663 - protein, 42 aa, Artificial Sequence
  chemically synthesized
SQVSPFKIPIEELEDRIFVNCNTSIYRASSLSNCRHTSSMEE

SEQ ID NO: 1664 - protein, 42 aa, Artificial Sequence
  chemically synthesized
SQVSPFKIPIEELEDRIFVNCNTSIYRASSLSNCRHTSSVDE

SEQ ID NO: 1665 - protein, 42 aa, Artificial Sequence
  chemically synthesized
  misc_feature (41)..(41): Xaa can be a proteinogenic, non-proteinogenic or synthetic amino acid like ornithin or selenocystein
SQVSPFKIPIEELEDRIFVNCNTSIYRASSLSNCRHTSSVXE

SEQ ID NO: 1666 - protein, 42 aa, Artificial Sequence
  chemically synthesized
SQVSPFKIPIEELEDRIFVNCNTSIYRASSLSNCRHTSSVED

SEQ ID NO: 1667 - protein, 42 aa, Artificial Sequence
  chemically synthesized
  misc_feature (42)..(42): Xaa can be a proteinogenic, non-proteinogenic or synthetic amino acid like ornithin or selenocystein
SQVSPFKIPIEELEDRIFVNCNTSIYRASSLSNCRHTSSVEX

SEQ ID NO: 1668 - protein, 42 aa, Artificial Sequence
  chemically synthesized
SQVSAFKIPIEELEDRIFVNCNTSIYRASSLSNCRHTSSVEE

SEQ ID NO: 1669 - protein, 42 aa, Artificial Sequence
  chemically synthesized
SQVSGFKIPIEELEDRIFVNCNTSIYRASSLSNCRHTSSVEE

SEQ ID NO: 1670 - protein, 42 aa, Artificial Sequence
  chemically synthesized
SQVSPFKIAIEELEDRIFVNCNTSIYRASSLSNCRHTSSVEE

SEQ ID NO: 1671 - protein, 42 aa, Artificial Sequence
  chemically synthesized
SQVSPFKIGIEELEDRIFVNCNTSIYRASSLSNCRHTSSVEE

SEQ ID NO: 1672 - protein, 42 aa, Artificial Sequence; identical to SEQ ID NO: 51
  chemically synthesized

SEQ ID NO: 1673 - protein, 42 aa, Artificial Sequence; identical to SEQ ID NO: 170
  chemically synthesized

SEQ ID NO: 1674 - protein, 42 aa, Artificial Sequence
  chemically synthesized
YQVSPFKIPIEELEDRVIVNCNTSIYRASSLSNCRHTSSVEE

SEQ ID NO: 1675 - protein, 42 aa, Artificial Sequence; identical to SEQ ID NO: 290
  chemically synthesized

SEQ ID NO: 1676 - protein, 42 aa, Artificial Sequence; identical to SEQ ID NO: 408
  chemically synthesized

SEQ ID NO: 1677 - protein, 42 aa, Artificial Sequence
  chemically synthesized
SQISPFKIPIEELEDRVIVNCNTSIYRASSLSNCRHTSSVEE

SEQ ID NO: 1678 - protein, 42 aa, Artificial Sequence
  chemically synthesized
SQPSPFKIPIEELEDRVIVNCNTSIYRASSLSNCRHTSSVEE

SEQ ID NO: 1679 - protein, 42 aa, Artificial Sequence
  chemically synthesized
SQFSPFKIPIEELEDRVIVNCNTSIYRASSLSNCRHTSSVEE

SEQ ID NO: 1680 - protein, 42 aa, Artificial Sequence; identical to SEQ ID NO: 527
  chemically synthesized

SEQ ID NO: 1681 - protein, 42 aa, Artificial Sequence
  chemically synthesized
SQVYPFKIPIEELEDRVIVNCNTSIYRASSLSNCRHTSSVEE

SEQ ID NO: 1682 - protein, 42 aa, Artificial Sequence
  chemically synthesized
SQVSPWKIPIEELEDRVIVNCNTSIYRASSLSNCRHTSSVEE

SEQ ID NO: 1683 - protein, 42 aa, Artificial Sequence
  chemically synthesized
SQVSPYKIPIEELEDRVIVNCNTSIYRASSLSNCRHTSSVEE

SEQ ID NO: 1684 - protein, 42 aa, Artificial Sequence
  chemically synthesized
SQVSPHKIPIEELEDRVIVNCNTSIYRASSLSNCRHTSSVEE

SEQ ID NO: 1685 - protein, 42 aa, Artificial Sequence
  chemically synthesized
SQVSPFRIPIEELEDRVIVNCNTSIYRASSLSNCRHTSSVEE

SEQ ID NO: 1686 - protein, 42 aa, Artificial Sequence
  chemically synthesized
SQVSPFHIPIEELEDRVIVNCNTSIYRASSLSNCRHTSSVEE

SEQ ID NO: 1687 - protein, 42 aa, Artificial Sequence
  chemically synthesized
  misc_feature (7)..(7): Xaa can be a proteinogenic, non-proteinogenic or synthetic amino acid like ornithin or selenocystein
SQVSPFXIPIEELEDRVIVNCNTSIYRASSLSNCRHTSSVEE

SEQ ID NO: 1688 - protein, 42 aa, Artificial Sequence; identical to SEQ ID NO: 766
  chemically synthesized

SEQ ID NO: 1689 - protein, 42 aa, Artificial Sequence
  chemically synthesized
SQVSPFKHPIEELEDRVIVNCNTSIYRASSLSNCRHTSSVEE

SEQ ID NO: 1690 - protein, 42 aa, Artificial Sequence
  chemically synthesized
SQVSPFKVPIEELEDRVIVNCNTSIYRASSLSNCRHTSSVEE

SEQ ID NO: 1691 - protein, 42 aa, Artificial Sequence
  chemically synthesized
SQVSPFKFPIEELEDRVIVNCNTSIYRASSLSNCRHTSSVEE

SEQ ID NO: 1692 - protein, 42 aa, Artificial Sequence
  chemically synthesized
SQVSPFKMPIEELEDRVIVNCNTSIYRASSLSNCRHTSSVEE

SEQ ID NO: 1693 - protein, 42 aa, Artificial Sequence; identical to SEQ ID NO: 884
  chemically synthesized

SEQ ID NO: 1694 - protein, 42 aa, Artificial Sequence
  chemically synthesized
SQVSPFKIPHEELEDRVIVNCNTSIYRASSLSNCRHTSSVEE

SEQ ID NO: 1695 - protein, 42 aa, Artificial Sequence
  chemically synthesized
SQVSPFKIPVEELEDRVIVNCNTSIYRASSLSNCRHTSSVEE

SEQ ID NO: 1696 - protein, 42 aa, Artificial Sequence
  chemically synthesized
SQVSPFKIPFEELEDRVIVNCNTSIYRASSLSNCRHTSSVEE

SEQ ID NO: 1697 - protein, 42 aa, Artificial Sequence
  chemically synthesized
SQVSPFKIPMEELEDRVIVNCNTSIYRASSLSNCRHTSSVEE

SEQ ID NO: 1698 - protein, 42 aa, Artificial Sequence; identical to SEQ ID NO: 1004
  chemically synthesized

SEQ ID NO: 1699 - protein, 42 aa, Artificial Sequence
  chemically synthesized
  misc_feature (11)..(11): Xaa can be a proteinogenic, non-proteinogenic or synthetic amino acid like ornithin or selenocystein
SQVSPFKIPIXELEDRVIVNCNTSIYRASSLSNCRHTSSVEE

SEQ ID NO: 1700 - protein, 42 aa, Artificial Sequence; identical to SEQ ID NO: 1124
  chemically synthesized

SEQ ID NO: 1701 - protein, 42 aa, Artificial Sequence
  chemically synthesized
  misc_feature (12)..(12): Xaa can be a proteinogenic, non-proteinogenic or synthetic amino acid like ornithin or selenocystein
SQVSPFKIPIEXLEDRVIVNCNTSIYRASSLSNCRHTSSVEE

SEQ ID NO: 1702 - protein, 42 aa, Artificial Sequence
  chemically synthesized
SQVSPFKIPIEEVEDRVIVNCNTSIYRASSLSNCRHTSSVEE

SEQ ID NO: 1703 - protein, 42 aa, Artificial Sequence; identical to SEQ ID NO: 1241
  chemically synthesized

SEQ ID NO: 1704 - protein, 42 aa, Artificial Sequence
  chemically synthesized
SQVSPFKIPIEEFEDRVIVNCNTSIYRASSLSNCRHTSSVEE

SEQ ID NO: 1705 - protein, 42 aa, Artificial Sequence
  chemically synthesized
SQVSPFKIPIEEHEDRVIVNCNTSIYRASSLSNCRHTSSVEE

SEQ ID NO: 1706 - protein, 42 aa, Artificial Sequence
  chemically synthesized
SQVSPFKIPIEEMEDRVIVNCNTSIYRASSLSNCRHTSSVEE

SEQ ID NO: 1707 - protein, 42 aa, Artificial Sequence; identical to SEQ ID NO: 1361
  chemically synthesized

SEQ ID NO: 1708 - protein, 42 aa, Artificial Sequence
  chemically synthesized
  misc_feature (14)..(14): Xaa can be a proteinogenic, non-proteinogenic or synthetic amino acid like ornithin or selenocystein
SQVSPFKIPIEELXDRVIVNCNTSIYRASSLSNCRHTSSVEE

SEQ ID NO: 1709 - protein, 42 aa, Artificial Sequence
  chemically synthesized
  misc_feature (15)..(15): Xaa can be a proteinogenic, non-proteinogenic or synthetic amino acid like ornithin or selenocystein
SQVSPFKIPIEELEXRVIVNCNTSIYRASSLSNCRHTSSVEE

SEQ ID NO: 1710 - protein, 42 aa, Artificial Sequence
  chemically synthesized
SQVSPFKIPIEELEERVIVNCNTSIYRASSLSNCRHTSSVEE

SEQ ID NO: 1711 - protein, 42 aa, Artificial Sequence; identical to SEQ ID NO: 1480
  chemically synthesized

SEQ ID NO: 1712 - protein, 42 aa, Artificial Sequence
  chemically synthesized
SQVSPFKIPIEELEDHVIVNCNTSIYRASSLSNCRHTSSVEE

SEQ ID NO: 1713 - protein, 42 aa, Artificial Sequence
  chemically synthesized
  misc_feature (16)..(16): Xaa can be a proteinogenic, non-proteinogenic or synthetic amino acid like ornithin or selenocystein
SQVSPFKIPIEELEDXVIVNCNTSIYRASSLSNCRHTSSVEE

SEQ ID NO: 1714 - protein, 42 aa, Artificial Sequence; identical to SEQ ID NO: 1597
  chemically synthesized

SEQ ID NO: 1715 - protein, 42 aa, Artificial Sequence
  chemically synthesized
SQVSPFKIPIEELEDRLIVNCNTSIYRASSLSNCRHTSSVEE

SEQ ID NO: 1716 - protein, 42 aa, Artificial Sequence
  chemically synthesized
SQVSPFKIPIEELEDRFIVNCNTSIYRASSLSNCRHTSSVEE

SEQ ID NO: 1717 - protein, 42 aa, Artificial Sequence
  chemically synthesized
SQVSPFKIPIEELEDRHIVNCNTSIYRASSLSNCRHTSSVEE

SEQ ID NO: 1718 - protein, 42 aa, Artificial Sequence
  chemically synthesized
SQVSPFKIPIEELEDRMIVNCNTSIYRASSLSNCRHTSSVEE

SEQ ID NO: 1719 - protein, 42 aa, Artificial Sequence
  chemically synthesized
SQVSPFKIPIEELEDRVIINCNTSIYRASSLSNCRHTSSVEE

SEQ ID NO: 1720 - protein, 42 aa, Artificial Sequence
  chemically synthesized
SQVSPFKIPIEELEDRVILNCNTSIYRASSLSNCRHTSSVEE

SEQ ID NO: 1721 - protein, 42 aa, Artificial Sequence
  chemically synthesized
SQVSPFKIPIEELEDRVIFNCNTSIYRASSLSNCRHTSSVEE

SEQ ID NO: 1722 - protein, 42 aa, Artificial Sequence
  chemically synthesized
SQVSPFKIPIEELEDRVIHNCNTSIYRASSLSNCRHTSSVEE

SEQ ID NO: 1723 - protein, 42 aa, Artificial Sequence
  chemically synthesized
SQVSPFKIPIEELEDRVIMNCNTSIYRASSLSNCRHTSSVEE

SEQ ID NO: 1724 - protein, 42 aa, Artificial Sequence
  chemically synthesized
SQVSPFKIPIEELEDRVIVQCNTSIYRASSLSNCRHTSSVEE

SEQ ID NO: 1725 - protein, 42 aa, Artificial Sequence
  chemically synthesized
SQVSPFKIPIEELEDRVIVNSNTSIYRASSLSNCRHTSSVEE

SEQ ID NO: 1726 - protein, 42 aa, Artificial Sequence
  chemically synthesized
SQVSPFKIPIEELEDRVIVNGNTSIYRASSLSNCRHTSSVEE

SEQ ID NO: 1727 - protein, 42 aa, Artificial Sequence
  chemically synthesized
SQVSPFKIPIEELEDRVIVNANTSIYRASSLSNCRHTSSVEE

SEQ ID NO: 1728 - protein, 42 aa, Artificial Sequence
  chemically synthesized
SQVSPFKIPIEELEDRVIVNCQTSIYRASSLSNCRHTSSVEE

SEQ ID NO: 1729 - protein, 42 aa, Artificial Sequence
  chemically synthesized
SQVSPFKIPIEELEDRVIVNCNSSIYRASSLSNCRHTSSVEE

SEQ ID NO: 1730 - protein, 42 aa, Artificial Sequence
  chemically synthesized
SQVSPFKIPIEELEDRVIVNCNYSIYRASSLSNCRHTSSVEE

SEQ ID NO: 1731 - protein, 42 aa, Artificial Sequence
  chemically synthesized
SQVSPFKIPIEELEDRVIVNCNTTIYRASSLSNCRHTSSVEE

SEQ ID NO: 1732 - protein, 42 aa, Artificial Sequence
  chemically synthesized
SQVSPFKIPIEELEDRVIVNCNTYIYRASSLSNCRHTSSVEE

SEQ ID NO: 1733 - protein, 42 aa, Artificial Sequence
  chemically synthesized
SQVSPFKIPIEELEDRVIVNCNTSVYRASSLSNCRHTSSVEE

SEQ ID NO: 1734 - protein, 42 aa, Artificial Sequence
  chemically synthesized
SQVSPFKIPIEELEDRVIVNCNTSLYRASSLSNCRHTSSVEE

SEQ ID NO: 1735 - protein, 42 aa, Artificial Sequence
  chemically synthesized
SQVSPFKIPIEELEDRVIVNCNTSHYRASSLSNCRHTSSVEE

SEQ ID NO: 1736 - protein, 42 aa, Artificial Sequence
  chemically synthesized
SQVSPFKIPIEELEDRVIVNCNTSFYRASSLSNCRHTSSVEE

SEQ ID NO: 1737 - protein, 42 aa, Artificial Sequence
  chemically synthesized
SQVSPFKIPIEELEDRVIVNCNTSMYRASSLSNCRHTSSVEE

SEQ ID NO: 1738 - protein, 42 aa, Artificial Sequence
  chemically synthesized
SQVSPFKIPIEELEDRVIVNCNTSIWRASSLSNCRHTSSVEE

SEQ ID NO: 1739 - protein, 42 aa, Artificial Sequence
  chemically synthesized
SQVSPFKIPIEELEDRVIVNCNTSIFRASSLSNCRHTSSVEE

SEQ ID NO: 1740 - protein, 42 aa, Artificial Sequence
  chemically synthesized
SQVSPFKIPIEELEDRVIVNCNTSISRASSLSNCRHTSSVEE

SEQ ID NO: 1741 - protein, 42 aa, Artificial Sequence
  chemically synthesized
SQVSPFKIPIEELEDRVIVNCNTSITRASSLSNCRHTSSVEE

SEQ ID NO: 1742 - protein, 42 aa, Artificial Sequence
  chemically synthesized
  misc_feature (27)..(27): Xaa can be a proteinogenic, non-proteinogenic or synthetic amino acid like ornithin or selenocystein
SQVSPFKIPIEELEDRVIVNCNTSIYXASSLSNCRHTSSVEE

SEQ ID NO: 1743 - protein, 42 aa, Artificial Sequence
  chemically synthesized
SQVSPFKIPIEELEDRVIVNCNTSIYHASSLSNCRHTSSVEE

SEQ ID NO: 1744 - protein, 42 aa, Artificial Sequence
  chemically synthesized
SQVSPFKIPIEELEDRVIVNCNTSIYKASSLSNCRHTSSVEE

SEQ ID NO: 1745 - protein, 42 aa, Artificial Sequence
  chemically synthesized
SQVSPFKIPIEELEDRVIVNCNTSIYRGSSLSNCRHTSSVEE

SEQ ID NO: 1746 - protein, 42 aa, Artificial Sequence
  chemically synthesized
SQVSPFKIPIEELEDRVIVNCNTSIYRATSLSNCRHTSSVEE

SEQ ID NO: 1747 - protein, 42 aa, Artificial Sequence
  chemically synthesized
SQVSPFKIPIEELEDRVIVNCNTSIYRAYSLSNCRHTSSVEE

SEQ ID NO: 1748 - protein, 42 aa, Artificial Sequence
  chemically synthesized
SQVSPFKIPIEELEDRVIVNCNTSIYRASTLSNCRHTSSVEE

SEQ ID NO: 1749 - protein, 42 aa, Artificial Sequence
  chemically synthesized
SQVSPFKIPIEELEDRVIVNCNTSIYRASYLSNCRHTSSVEE

SEQ ID NO: 1750 - protein, 42 aa, Artificial Sequence
  chemically synthesized
SQVSPFKIPIEELEDRVIVNCNTSIYRASSISNCRHTSSVEE

SEQ ID NO: 1751 - protein, 42 aa, Artificial Sequence
  chemically synthesized
SQVSPFKIPIEELEDRVIVNCNTSIYRASSVSNCRHTSSVEE

SEQ ID NO: 1752 - protein, 42 aa, Artificial Sequence
  chemically synthesized
SQVSPFKIPIEELEDRVIVNCNTSIYRASSFSNCRHTSSVEE

SEQ ID NO: 1753 - protein, 42 aa, Artificial Sequence
  chemically synthesized
SQVSPFKIPIEELEDRVIVNCNTSIYRASSMSNCRHTSSVEE

SEQ ID NO: 1754 - protein, 42 aa, Artificial Sequence
  chemically synthesized
SQVSPFKIPIEELEDRVIVNCNTSIYRASSHSNCRHTSSVEE

SEQ ID NO: 1755 - protein, 42 aa, Artificial Sequence
  chemically synthesized
SQVSPFKIPIEELEDRVIVNCNTSIYRASSLTNCRHTSSVEE

SEQ ID NO: 1756 - protein, 42 aa, Artificial Sequence
  chemically synthesized
SQVSPFKIPIEELEDRVIVNCNTSIYRASSLYNCRHTSSVEE

SEQ ID NO: 1757 - protein, 42 aa, Artificial Sequence
  chemically synthesized
SQVSPFKIPIEELEDRVIVNCNTSIYRASSLSQCRHTSSVEE

SEQ ID NO: 1758 - protein, 42 aa, Artificial Sequence
  chemically synthesized
SQVSPFKIPIEELEDRVIVNCNTSIYRASSLSNSRHTSSVEE

SEQ ID NO: 1759 - protein, 42 aa, Artificial Sequence
  chemically synthesized
SQVSPFKIPIEELEDRVIVNCNTSIYRASSLSNGRHTSSVEE

SEQ ID NO: 1760 - protein, 42 aa, Artificial Sequence
  chemically synthesized
SQVSPFKIPIEELEDRVIVNCNTSIYRASSLSNARHTSSVEE

SEQ ID NO: 1761 - protein, 42 aa, Artificial Sequence
  chemically synthesized
  misc_feature (35)..(35): Xaa can be a proteinogenic, non-proteinogenic or synthetic amino acid like ornithin or selenocystein
SQVSPFKIPIEELEDRVIVNCNTSIYRASSLSNCXHTSSVEE

SEQ ID NO: 1762 - protein, 42 aa, Artificial Sequence
  chemically synthesized
SQVSPFKIPIEELEDRVIVNCNTSIYRASSLSNCHHTSSVEE

SEQ ID NO: 1763 - protein, 42 aa, Artificial Sequence
  chemically synthesized
SQVSPFKIPIEELEDRVIVNCNTSIYRASSLSNCKHTSSVEE

SEQ ID NO: 1764 - protein, 42 aa, Artificial Sequence
  chemically synthesized
SQVSPFKIPIEELEDRVIVNCNTSIYRASSLSNCRGTSSVEE

SEQ ID NO: 1765 - protein, 42 aa, Artificial Sequence
  chemically synthesized
SQVSPFKIPIEELEDRVIVNCNTSIYRASSLSNCRATSSVEE

SEQ ID NO: 1766 - protein, 42 aa, Artificial Sequence
  chemically synthesized
SQVSPFKIPIEELEDRVIVNCNTSIYRASSLSNCRITSSVEE

SEQ ID NO: 1767 - protein, 42 aa, Artificial Sequence
  chemically synthesized
SQVSPFKIPIEELEDRVIVNCNTSIYRASSLSNCRLTSSVEE

SEQ ID NO: 1768 - protein, 42 aa, Artificial Sequence
  chemically synthesized
SQVSPFKIPIEELEDRVIVNCNTSIYRASSLSNCRMTSSVEE

SEQ ID NO: 1769 - protein, 42 aa, Artificial Sequence
  chemically synthesized
SQVSPFKIPIEELEDRVIVNCNTSIYRASSLSNCRVTSSVEE

SEQ ID NO: 1770 - protein, 42 aa, Artificial Sequence
  chemically synthesized
SQVSPFKIPIEELEDRVIVNCNTSIYRASSLSNCRHSSSVEE

SEQ ID NO: 1771 - protein, 42 aa, Artificial Sequence
  chemically synthesized
SQVSPFKIPIEELEDRVIVNCNTSIYRASSLSNCRHYSSVEE

SEQ ID NO: 1772 - protein, 42 aa, Artificial Sequence
  chemically synthesized
SQVSPFKIPIEELEDRVIVNCNTSIYRASSLSNCRHTTSVEE

SEQ ID NO: 1773 - protein, 42 aa, Artificial Sequence
  chemically synthesized
SQVSPFKIPIEELEDRVIVNCNTSIYRASSLSNCRHTYSVEE

SEQ ID NO: 1774 - protein, 42 aa, Artificial Sequence
  chemically synthesized
SQVSPFKIPIEELEDRVIVNCNTSIYRASSLSNCRHTSTVEE

SEQ ID NO: 1775 - protein, 42 aa, Artificial Sequence
  chemically synthesized
SQVSPFKIPIEELEDRVIVNCNTSIYRASSLSNCRHTSYVEE

SEQ ID NO: 1776 - protein, 42 aa, Artificial Sequence
  chemically synthesized
SQVSPFKIPIEELEDRVIVNCNTSIYRASSLSNCRHTSSIEE

SEQ ID NO: 1777 - protein, 42 aa, Artificial Sequence
  chemically synthesized
SQVSPFKIPIEELEDRVIVNCNTSIYRASSLSNCRHTSSLEE

SEQ ID NO: 1778 - protein, 42 aa, Artificial Sequence
  chemically synthesized
SQVSPFKIPIEELEDRVIVNCNTSIYRASSLSNCRHTSSFEE

SEQ ID NO: 1779 - protein, 42 aa, Artificial Sequence
  chemically synthesized
SQVSPFKIPIEELEDRVIVNCNTSIYRASSLSNCRHTSSHEE

SEQ ID NO: 1780 - protein, 42 aa, Artificial Sequence
  chemically synthesized
SQVSPFKIPIEELEDRVIVNCNTSIYRASSLSNCRHTSSMEE

SEQ ID NO: 1781 - protein, 42 aa, Artificial Sequence
  chemically synthesized
SQVSPFKIPIEELEDRVIVNCNTSIYRASSLSNCRHTSSVDE

SEQ ID NO: 1782 - protein, 42 aa, Artificial Sequence
  chemically synthesized
  misc_feature (41)..(41): Xaa can be a proteinogenic, non-proteinogenic or synthetic amino acid like ornithin or selenocystein
SQVSPFKIPIEELEDRVIVNCNTSIYRASSLSNCRHTSSVXE

SEQ ID NO: 1783 - protein, 42 aa, Artificial Sequence
  chemically synthesized
SQVSPFKIPIEELEDRVIVNCNTSIYRASSLSNCRHTSSVED

SEQ ID NO: 1784 - protein, 42 aa, Artificial Sequence
  chemically synthesized
  misc_feature (42)..(42): Xaa can be a proteinogenic, non-proteinogenic or synthetic amino acid like ornithin or selenocystein
SQVSPFKIPIEELEDRVIVNCNTSIYRASSLSNCRHTSSVEX

SEQ ID NO: 1785 - protein, 42 aa, Artificial Sequence
  chemically synthesized
SQVSAFKIPIEELEDRVIVNCNTSIYRASSLSNCRHTSSVEE

SEQ ID NO: 1786 - protein, 42 aa, Artificial Sequence
  chemically synthesized
SQVSGFKIPIEELEDRVIVNCNTSIYRASSLSNCRHTSSVEE

SEQ ID NO: 1787 - protein, 42 aa, Artificial Sequence
  chemically synthesized
SQVSPFKIAIEELEDRVIVNCNTSIYRASSLSNCRHTSSVEE

SEQ ID NO: 1788 - protein, 42 aa, Artificial Sequence
  chemically synthesized
SQVSPFKIGIEELEDRVIVNCNTSIYRASSLSNCRHTSSVEE

SEQ ID NO: 1789 - protein, 42 aa, Artificial Sequence; identical to SEQ ID NO: 56
  chemically synthesized

SEQ ID NO: 1790 - protein, 42 aa, Artificial Sequence; identical to SEQ ID NO: 175
  chemically synthesized

SEQ ID NO: 1791 - protein, 42 aa, Artificial Sequence
  chemically synthesized
YQVSPFKIPIEELEDRVFINCNTSIYRASSLSNCRHTSSVEE

SEQ ID NO: 1792 - protein, 42 aa, Artificial Sequence; identical to SEQ ID NO: 295
  chemically synthesized

SEQ ID NO: 1793 - protein, 42 aa, Artificial Sequence; identical to SEQ ID NO: 413
  chemically synthesized

SEQ ID NO: 1794 - protein, 42 aa, Artificial Sequence
  chemically synthesized
SQISPFKIPIEELEDRVFINCNTSIYRASSLSNCRHTSSVEE

SEQ ID NO: 1795 - protein, 42 aa, Artificial Sequence
  chemically synthesized
SQPSPFKIPIEELEDRVFINCNTSIYRASSLSNCRHTSSVEE

SEQ ID NO: 1796 - protein, 42 aa, Artificial Sequence
  chemically synthesized
SQFSPFKIPIEELEDRVFINCNTSIYRASSLSNCRHTSSVEE

SEQ ID NO: 1797 - protein, 42 aa, Artificial Sequence; identical to SEQ ID NO: 532
  chemically synthesized

SEQ ID NO: 1798 - protein, 42 aa, Artificial Sequence
  chemically synthesized
SQVYPFKIPIEELEDRVFINCNTSIYRASSLSNCRHTSSVEE

SEQ ID NO: 1799 - protein, 42 aa, Artificial Sequence
  chemically synthesized
SQVSPWKIPIEELEDRVFINCNTSIYRASSLSNCRHTSSVEE

SEQ ID NO: 1800 - protein, 42 aa, Artificial Sequence
  chemically synthesized
SQVSPYKIPIEELEDRVFINCNTSIYRASSLSNCRHTSSVEE

SEQ ID NO: 1801 - protein, 42 aa, Artificial Sequence
  chemically synthesized
SQVSPHKIPIEELEDRVFINCNTSIYRASSLSNCRHTSSVEE

SEQ ID NO: 1802 - protein, 42 aa, Artificial Sequence
  chemically synthesized
SQVSPFRIPIEELEDRVFINCNTSIYRASSLSNCRHTSSVEE

SEQ ID NO: 1803 - protein, 42 aa, Artificial Sequence
  chemically synthesized
SQVSPFHIPIEELEDRVFINCNTSIYRASSLSNCRHTSSVEE

SEQ ID NO: 1804 - protein, 42 aa, Artificial Sequence
  chemically synthesized
  misc_feature (7)..(7): Xaa can be a proteinogenic, non-proteinogenic or synthetic amino acid like ornithin or selenocystein
SQVSPFXIPIEELEDRVFINCNTSIYRASSLSNCRHTSSVEE

SEQ ID NO: 1805 - protein, 42 aa, Artificial Sequence; identical to SEQ ID NO: 771
  chemically synthesized

SEQ ID NO: 1806 - protein, 42 aa, Artificial Sequence
  chemically synthesized
SQVSPFKHPIEELEDRVFINCNTSIYRASSLSNCRHTSSVEE

SEQ ID NO: 1807 - protein, 42 aa, Artificial Sequence
  chemically synthesized
SQVSPFKVPIEELEDRVFINCNTSIYRASSLSNCRHTSSVEE

SEQ ID NO: 1808 - protein, 42 aa, Artificial Sequence
  chemically synthesized
SQVSPFKFPIEELEDRVFINCNTSIYRASSLSNCRHTSSVEE

SEQ ID NO: 1809 - protein, 42 aa, Artificial Sequence
  chemically synthesized
SQVSPFKMPIEELEDRVFINCNTSIYRASSLSNCRHTSSVEE

SEQ ID NO: 1810 - protein, 42 aa, Artificial Sequence; identical to SEQ ID NO: 889
  chemically synthesized

SEQ ID NO: 1811 - protein, 42 aa, Artificial Sequence
  chemically synthesized
SQVSPFKIPHEELEDRVFINCNTSIYRASSLSNCRHTSSVEE

SEQ ID NO: 1812 - protein, 42 aa, Artificial Sequence
  chemically synthesized
SQVSPFKIPVEELEDRVFINCNTSIYRASSLSNCRHTSSVEE

SEQ ID NO: 1813 - protein, 42 aa, Artificial Sequence
  chemically synthesized
SQVSPFKIPFEELEDRVFINCNTSIYRASSLSNCRHTSSVEE

SEQ ID NO: 1814 - protein, 42 aa, Artificial Sequence
  chemically synthesized
SQVSPFKIPMEELEDRVFINCNTSIYRASSLSNCRHTSSVEE

SEQ ID NO: 1815 - protein, 42 aa, Artificial Sequence; identical to SEQ ID NO: 1009
  chemically synthesized

SEQ ID NO: 1816 - protein, 42 aa, Artificial Sequence
  chemically synthesized
  misc_feature (11)..(11): Xaa can be a proteinogenic, non-proteinogenic or synthetic amino acid like ornithin or selenocystein
SQVSPFKIPIXELEDRVFINCNTSIYRASSLSNCRHTSSVEE

SEQ ID NO: 1817 - protein, 42 aa, Artificial Sequence; identical to SEQ ID NO: 1129
  chemically synthesized

SEQ ID NO: 1818 - protein, 42 aa, Artificial Sequence
  chemically synthesized
  misc_feature (12)..(12): Xaa can be a proteinogenic, non-proteinogenic or synthetic amino acid like ornithin or selenocystein
SQVSPFKIPIEXLEDRVFINCNTSIYRASSLSNCRHTSSVEE

SEQ ID NO: 1819 - protein, 42 aa, Artificial Sequence
  chemically synthesized
SQVSPFKIPIEEVEDRVFINCNTSIYRASSLSNCRHTSSVEE

SEQ ID NO: 1820 - protein, 42 aa, Artificial Sequence; identical to SEQ ID NO: 1246
  chemically synthesized

SEQ ID NO: 1821 - protein, 42 aa, Artificial Sequence
  chemically synthesized
SQVSPFKIPIEEFEDRVFINCNTSIYRASSLSNCRHTSSVEE

SEQ ID NO: 1822 - protein, 42 aa, Artificial Sequence
  chemically synthesized
SQVSPFKIPIEEHEDRVFINCNTSIYRASSLSNCRHTSSVEE

SEQ ID NO: 1823 - protein, 42 aa, Artificial Sequence
  chemically synthesized
SQVSPFKIPIEEMEDRVFINCNTSIYRASSLSNCRHTSSVEE

SEQ ID NO: 1824 - protein, 42 aa, Artificial Sequence; identical to SEQ ID NO: 1366
  chemically synthesized

SEQ ID NO: 1825 - protein, 42 aa, Artificial Sequence
  chemically synthesized
  misc_feature (14)..(14): Xaa can be a proteinogenic, non-proteinogenic or synthetic amino acid like ornithin or selenocystein
SQVSPFKIPIEELXDRVFINCNTSIYRASSLSNCRHTSSVEE

SEQ ID NO: 1826 - protein, 42 aa, Artificial Sequence
  chemically synthesized
  misc_feature (15)..(15): Xaa can be a proteinogenic, non-proteinogenic or synthetic amino acid like ornithin or selenocystein
SQVSPFKIPIEELEXRVFINCNTSIYRASSLSNCRHTSSVEE

SEQ ID NO: 1827 - protein, 42 aa, Artificial Sequence
  chemically synthesized
SQVSPFKIPIEELEERVFINCNTSIYRASSLSNCRHTSSVEE

SEQ ID NO: 1828 - protein, 42 aa, Artificial Sequence; identical to SEQ ID NO: 1485
  chemically synthesized

SEQ ID NO: 1829 - protein, 42 aa, Artificial Sequence
  chemically synthesized
SQVSPFKIPIEELEDHVFINCNTSIYRASSLSNCRHTSSVEE

SEQ ID NO: 1830 - protein, 42 aa, Artificial Sequence
  chemically synthesized
  misc_feature (16)..(16): Xaa can be a proteinogenic, non-proteinogenic or synthetic amino acid like ornithin or selenocystein
SQVSPFKIPIEELEDXVFINCNTSIYRASSLSNCRHTSSVEE

SEQ ID NO: 1831 - protein, 42 aa, Artificial Sequence; identical to SEQ ID NO: 1602
  chemically synthesized

SEQ ID NO: 1832 - protein, 42 aa, Artificial Sequence
  chemically synthesized
SQVSPFKIPIEELEDRLFINCNTSIYRASSLSNCRHTSSVEE

SEQ ID NO: 1833 - protein, 42 aa, Artificial Sequence
  chemically synthesized
SQVSPFKIPIEELEDRFFINCNTSIYRASSLSNCRHTSSVEE

SEQ ID NO: 1834 - protein, 42 aa, Artificial Sequence
  chemically synthesized
SQVSPFKIPIEELEDRHFINCNTSIYRASSLSNCRHTSSVEE

SEQ ID NO: 1835 - protein, 42 aa, Artificial Sequence
  chemically synthesized
SQVSPFKIPIEELEDRMFINCNTSIYRASSLSNCRHTSSVEE

SEQ ID NO: 1836 - protein, 42 aa, Artificial Sequence; identical to SEQ ID NO: 1719
  chemically synthesized

SEQ ID NO: 1837 - protein, 42 aa, Artificial Sequence
  chemically synthesized
SQVSPFKIPIEELEDRVLINCNTSIYRASSLSNCRHTSSVEE

SEQ ID NO: 1838 - protein, 42 aa, Artificial Sequence
  chemically synthesized
SQVSPFKIPIEELEDRVVINCNTSIYRASSLSNCRHTSSVEE

SEQ ID NO: 1839 - protein, 42 aa, Artificial Sequence
  chemically synthesized
SQVSPFKIPIEELEDRVHINCNTSIYRASSLSNCRHTSSVEE

SEQ ID NO: 1840 - protein, 42 aa, Artificial Sequence
  chemically synthesized
SQVSPFKIPIEELEDRVMINCNTSIYRASSLSNCRHTSSVEE

SEQ ID NO: 1841 - protein, 42 aa, Artificial Sequence
  chemically synthesized
SQVSPFKIPIEELEDRVFIQCNTSIYRASSLSNCRHTSSVEE

SEQ ID NO: 1842 - protein, 42 aa, Artificial Sequence
  chemically synthesized
SQVSPFKIPIEELEDRVFINSNTSIYRASSLSNCRHTSSVEE

SEQ ID NO: 1843 - protein, 42 aa, Artificial Sequence
  chemically synthesized
SQVSPFKIPIEELEDRVFINGNTSIYRASSLSNCRHTSSVEE

SEQ ID NO: 1844 - protein, 42 aa, Artificial Sequence
  chemically synthesized
SQVSPFKIPIEELEDRVFINANTSIYRASSLSNCRHTSSVEE

SEQ ID NO: 1845 - protein, 42 aa, Artificial Sequence
  chemically synthesized
SQVSPFKIPIEELEDRVFINCQTSIYRASSLSNCRHTSSVEE

SEQ ID NO: 1846 - protein, 42 aa, Artificial Sequence
  chemically synthesized
SQVSPFKIPIEELEDRVFINCNSSIYRASSLSNCRHTSSVEE

SEQ ID NO: 1847 - protein, 42 aa, Artificial Sequence
  chemically synthesized
SQVSPFKIPIEELEDRVFINCNYSIYRASSLSNCRHTSSVEE

SEQ ID NO: 1848 - protein, 42 aa, Artificial Sequence
  chemically synthesized
SQVSPFKIPIEELEDRVFINCNTTIYRASSLSNCRHTSSVEE

SEQ ID NO: 1849 - protein, 42 aa, Artificial Sequence
  chemically synthesized
SQVSPFKIPIEELEDRVFINCNTYIYRASSLSNCRHTSSVEE

SEQ ID NO: 1850 - protein, 42 aa, Artificial Sequence
  chemically synthesized
SQVSPFKIPIEELEDRVFINCNTSVYRASSLSNCRHTSSVEE

SEQ ID NO: 1851 - protein, 42 aa, Artificial Sequence
  chemically synthesized
SQVSPFKIPIEELEDRVFINCNTSLYRASSLSNCRHTSSVEE

SEQ ID NO: 1852 - protein, 42 aa, Artificial Sequence
  chemically synthesized
SQVSPFKIPIEELEDRVFINCNTSHYRASSLSNCRHTSSVEE

SEQ ID NO: 1853 - protein, 42 aa, Artificial Sequence
  chemically synthesized
SQVSPFKIPIEELEDRVFINCNTSFYRASSLSNCRHTSSVEE

SEQ ID NO: 1854 - protein, 42 aa, Artificial Sequence
  chemically synthesized
SQVSPFKIPIEELEDRVFINCNTSMYRASSLSNCRHTSSVEE

SEQ ID NO: 1855 - protein, 42 aa, Artificial Sequence
  chemically synthesized
SQVSPFKIPIEELEDRVFINCNTSIWRASSLSNCRHTSSVEE

SEQ ID NO: 1856 - protein, 42 aa, Artificial Sequence
  chemically synthesized
SQVSPFKIPIEELEDRVFINCNTSIFRASSLSNCRHTSSVEE

SEQ ID NO: 1857 - protein, 42 aa, Artificial Sequence
  chemically synthesized
SQVSPFKIPIEELEDRVFINCNTSISRASSLSNCRHTSSVEE

SEQ ID NO: 1858 - protein, 42 aa, Artificial Sequence
  chemically synthesized
SQVSPFKIPIEELEDRVFINCNTSITRASSLSNCRHTSSVEE

SEQ ID NO: 1859 - protein, 42 aa, Artificial Sequence
  chemically synthesized
  misc_feature (27)..(27): Xaa can be a proteinogenic, non-proteinogenic or synthetic amino acid like ornithin or selenocystein
SQVSPFKIPIEELEDRVFINCNTSIYXASSLSNCRHTSSVEE

SEQ ID NO: 1860 - protein, 42 aa, Artificial Sequence
  chemically synthesized
SQVSPFKIPIEELEDRVFINCNTSIYHASSLSNCRHTSSVEE

SEQ ID NO: 1861 - protein, 42 aa, Artificial Sequence
  chemically synthesized
SQVSPFKIPIEELEDRVFINCNTSIYKASSLSNCRHTSSVEE

SEQ ID NO: 1862 - protein, 42 aa, Artificial Sequence
  chemically synthesized
SQVSPFKIPIEELEDRVFINCNTSIYRGSSLSNCRHTSSVEE

SEQ ID NO: 1863 - protein, 42 aa, Artificial Sequence
  chemically synthesized
SQVSPFKIPIEELEDRVFINCNTSIYRATSLSNCRHTSSVEE

SEQ ID NO: 1864 - protein, 42 aa, Artificial Sequence
  chemically synthesized
SQVSPFKIPIEELEDRVFINCNTSIYRAYSLSNCRHTSSVEE

SEQ ID NO: 1865 - protein, 42 aa, Artificial Sequence
  chemically synthesized
SQVSPFKIPIEELEDRVFINCNTSIYRASTLSNCRHTSSVEE

SEQ ID NO: 1866 - protein, 42 aa, Artificial Sequence
  chemically synthesized
SQVSPFKIPIEELEDRVFINCNTSIYRASYLSNCRHTSSVEE

SEQ ID NO: 1867 - protein, 42 aa, Artificial Sequence
  chemically synthesized
SQVSPFKIPIEELEDRVFINCNTSIYRASSISNCRHTSSVEE

SEQ ID NO: 1868 - protein, 42 aa, Artificial Sequence
  chemically synthesized
SQVSPFKIPIEELEDRVFINCNTSIYRASSVSNCRHTSSVEE

SEQ ID NO: 1869 - protein, 42 aa, Artificial Sequence
  chemically synthesized
SQVSPFKIPIEELEDRVFINCNTSIYRASSFSNCRHTSSVEE

SEQ ID NO: 1870 - protein, 42 aa, Artificial Sequence
  chemically synthesized
SQVSPFKIPIEELEDRVFINCNTSIYRASSMSNCRHTSSVEE

SEQ ID NO: 1871 - protein, 42 aa, Artificial Sequence
  chemically synthesized
SQVSPFKIPIEELEDRVFINCNTSIYRASSHSNCRHTSSVEE

SEQ ID NO: 1872 - protein, 42 aa, Artificial Sequence
  chemically synthesized
SQVSPFKIPIEELEDRVFINCNTSIYRASSLTNCRHTSSVEE

SEQ ID NO: 1873 - protein, 42 aa, Artificial Sequence
  chemically synthesized
SQVSPFKIPIEELEDRVFINCNTSIYRASSLYNCRHTSSVEE

SEQ ID NO: 1874 - protein, 42 aa, Artificial Sequence
  chemically synthesized
SQVSPFKIPIEELEDRVFINCNTSIYRASSLSQCRHTSSVEE

SEQ ID NO: 1875 - protein, 42 aa, Artificial Sequence
  chemically synthesized
SQVSPFKIPIEELEDRVFINCNTSIYRASSLSNSRHTSSVEE

SEQ ID NO: 1876 - protein, 42 aa, Artificial Sequence
  chemically synthesized
SQVSPFKIPIEELEDRVFINCNTSIYRASSLSNGRHTSSVEE

SEQ ID NO: 1877 - protein, 42 aa, Artificial Sequence
  chemically synthesized
SQVSPFKIPIEELEDRVFINCNTSIYRASSLSNARHTSSVEE

SEQ ID NO: 1878 - protein, 42 aa, Artificial Sequence
  chemically synthesized
  misc_feature (35)..(35): Xaa can be a proteinogenic, non-proteinogenic or synthetic amino acid like ornithin or selenocystein
SQVSPFKIPIEELEDRVFINCNTSIYRASSLSNCXHTSSVEE

SEQ ID NO: 1879 - protein, 42 aa, Artificial Sequence
  chemically synthesized
SQVSPFKIPIEELEDRVFINCNTSIYRASSLSNCHHTSSVEE

SEQ ID NO: 1880 - protein, 42 aa, Artificial Sequence
  chemically synthesized
SQVSPFKIPIEELEDRVFINCNTSIYRASSLSNCKHTSSVEE

SEQ ID NO: 1881 - protein, 42 aa, Artificial Sequence
  chemically synthesized
SQVSPFKIPIEELEDRVFINCNTSIYRASSLSNCRGTSSVEE

SEQ ID NO: 1882 - protein, 42 aa, Artificial Sequence
  chemically synthesized
SQVSPFKIPIEELEDRVFINCNTSIYRASSLSNCRATSSVEE

SEQ ID NO: 1883 - protein, 42 aa, Artificial Sequence
  chemically synthesized
SQVSPFKIPIEELEDRVFINCNTSIYRASSLSNCRITSSVEE

SEQ ID NO: 1884 - protein, 42 aa, Artificial Sequence
  chemically synthesized
SQVSPFKIPIEELEDRVFINCNTSIYRASSLSNCRLTSSVEE

SEQ ID NO: 1885 - protein, 42 aa, Artificial Sequence
  chemically synthesized
SQVSPFKIPIEELEDRVFINCNTSIYRASSLSNCRMTSSVEE

SEQ ID NO: 1886 - protein, 42 aa, Artificial Sequence
  chemically synthesized
SQVSPFKIPIEELEDRVFINCNTSIYRASSLSNCRVTSSVEE

SEQ ID NO: 1887 - protein, 42 aa, Artificial Sequence
  chemically synthesized
SQVSPFKIPIEELEDRVFINCNTSIYRASSLSNCRHSSSVEE

SEQ ID NO: 1888 - protein, 42 aa, Artificial Sequence
  chemically synthesized
SQVSPFKIPIEELEDRVFINCNTSIYRASSLSNCRHYSSVEE

SEQ ID NO: 1889 - protein, 42 aa, Artificial Sequence
  chemically synthesized
SQVSPFKIPIEELEDRVFINCNTSIYRASSLSNCRHTTSVEE

SEQ ID NO: 1890 - protein, 42 aa, Artificial Sequence
  chemically synthesized
SQVSPFKIPIEELEDRVFINCNTSIYRASSLSNCRHTYSVEE

SEQ ID NO: 1891 - protein, 42 aa, Artificial Sequence
  chemically synthesized
SQVSPFKIPIEELEDRVFINCNTSIYRASSLSNCRHTSTVEE

SEQ ID NO: 1892 - protein, 42 aa, Artificial Sequence
  chemically synthesized
SQVSPFKIPIEELEDRVFINCNTSIYRASSLSNCRHTSYVEE

SEQ ID NO: 1893 - protein, 42 aa, Artificial Sequence
  chemically synthesized
SQVSPFKIPIEELEDRVFINCNTSIYRASSLSNCRHTSSIEE

SEQ ID NO: 1894 - protein, 42 aa, Artificial Sequence
  chemically synthesized
SQVSPFKIPIEELEDRVFINCNTSIYRASSLSNCRHTSSLEE

SEQ ID NO: 1895 - protein, 42 aa, Artificial Sequence
  chemically synthesized
SQVSPFKIPIEELEDRVFINCNTSIYRASSLSNCRHTSSFEE

SEQ ID NO: 1896 - protein, 42 aa, Artificial Sequence
  chemically synthesized
SQVSPFKIPIEELEDRVFINCNTSIYRASSLSNCRHTSSHEE

SEQ ID NO: 1897 - protein, 42 aa, Artificial Sequence
  chemically synthesized
SQVSPFKIPIEELEDRVFINCNTSIYRASSLSNCRHTSSMEE

SEQ ID NO: 1898 - protein, 42 aa, Artificial Sequence
  chemically synthesized
SQVSPFKIPIEELEDRVFINCNTSIYRASSLSNCRHTSSVDE

SEQ ID NO: 1899 - protein, 42 aa, Artificial Sequence
  chemically synthesized
  misc_feature (41)..(41): Xaa can be a proteinogenic, non-proteinogenic or synthetic amino acid like ornithin or selenocystein
SQVSPFKIPIEELEDRVFINCNTSIYRASSLSNCRHTSSVXE

SEQ ID NO: 1900 - protein, 42 aa, Artificial Sequence
  chemically synthesized
SQVSPFKIPIEELEDRVFINCNTSIYRASSLSNCRHTSSVED

SEQ ID NO: 1901 - protein, 42 aa, Artificial Sequence
  chemically synthesized
  misc_feature (42)..(42): Xaa can be a proteinogenic, non-proteinogenic or synthetic amino acid like ornithin or selenocystein
SQVSPFKIPIEELEDRVFINCNTSIYRASSLSNCRHTSSVEX

SEQ ID NO: 1902 - protein, 42 aa, Artificial Sequence
  chemically synthesized
SQVSAFKIPIEELEDRVFINCNTSIYRASSLSNCRHTSSVEE

SEQ ID NO: 1903 - protein, 42 aa, Artificial Sequence
  chemically synthesized
SQVSGFKIPIEELEDRVFINCNTSIYRASSLSNCRHTSSVEE

SEQ ID NO: 1904 - protein, 42 aa, Artificial Sequence
  chemically synthesized
SQVSPFKIAIEELEDRVFINCNTSIYRASSLSNCRHTSSVEE

SEQ ID NO: 1905 - protein, 42 aa, Artificial Sequence
  chemically synthesized
SQVSPFKIGIEELEDRVFINCNTSIYRASSLSNCRHTSSVEE

SEQ ID NO: 1906 - protein, 42 aa, Artificial Sequence; identical to SEQ ID NO: 61
  chemically synthesized

SEQ ID NO: 1907 - protein, 42 aa, Artificial Sequence; identical to SEQ ID NO: 180
  chemically synthesized

SEQ ID NO: 1908 - protein, 42 aa, Artificial Sequence
  chemically synthesized
YQVSPFKIPIEELEDRVFVQCNTSIYRASSLSNCRHTSSVEE

SEQ ID NO: 1909 - protein, 42 aa, Artificial Sequence; identical to SEQ ID NO: 300
  chemically synthesized

SEQ ID NO: 1910 - protein, 42 aa, Artificial Sequence; identical to SEQ ID NO: 418
  chemically synthesized

SEQ ID NO: 1911 - protein, 42 aa, Artificial Sequence
  chemically synthesized
SQISPFKIPIEELEDRVFVQCNTSIYRASSLSNCRHTSSVEE

SEQ ID NO: 1912 - protein, 42 aa, Artificial Sequence
  chemically synthesized
SQPSPFKIPIEELEDRVFVQCNTSIYRASSLSNCRHTSSVEE

SEQ ID NO: 1913 - protein, 42 aa, Artificial Sequence
  chemically synthesized
SQFSPFKIPIEELEDRVFVQCNTSIYRASSLSNCRHTSSVEE

SEQ ID NO: 1914 - protein, 42 aa, Artificial Sequence; identical to SEQ ID NO: 537
  chemically synthesized

SEQ ID NO: 1915 - protein, 42 aa, Artificial Sequence
  chemically synthesized
SQVYPFKIPIEELEDRVFVQCNTSIYRASSLSNCRHTSSVEE

SEQ ID NO: 1916 - protein, 42 aa, Artificial Sequence
  chemically synthesized
SQVSPWKIPIEELEDRVFVQCNTSIYRASSLSNCRHTSSVEE

SEQ ID NO: 1917 - protein, 42 aa, Artificial Sequence
  chemically synthesized
SQVSPYKIPIEELEDRVFVQCNTSIYRASSLSNCRHTSSVEE

SEQ ID NO: 1918 - protein, 42 aa, Artificial Sequence
  chemically synthesized
SQVSPHKIPIEELEDRVFVQCNTSIYRASSLSNCRHTSSVEE

SEQ ID NO: 1919 - protein, 42 aa, Artificial Sequence
  chemically synthesized
SQVSPFRIPIEELEDRVFVQCNTSIYRASSLSNCRHTSSVEE

SEQ ID NO: 1920 - protein, 42 aa, Artificial Sequence
  chemically synthesized
SQVSPFHIPIEELEDRVFVQCNTSIYRASSLSNCRHTSSVEE

SEQ ID NO: 1921 - protein, 42 aa, Artificial Sequence
  chemically synthesized
  misc_feature (7)..(7): Xaa can be a proteinogenic, non-proteinogenic or synthetic amino acid like ornithin or selenocystein
SQVSPFXIPIEELEDRVFVQCNTSIYRASSLSNCRHTSSVEE

SEQ ID NO: 1922 - protein, 42 aa, Artificial Sequence; identical to SEQ ID NO: 776
  chemically synthesized

SEQ ID NO: 1923 - protein, 42 aa, Artificial Sequence
  chemically synthesized
SQVSPFKHPIEELEDRVFVQCNTSIYRASSLSNCRHTSSVEE

SEQ ID NO: 1924 - protein, 42 aa, Artificial Sequence
  chemically synthesized
SQVSPFKVPIEELEDRVFVQCNTSIYRASSLSNCRHTSSVEE

SEQ ID NO: 1925 - protein, 42 aa, Artificial Sequence
  chemically synthesized
SQVSPFKFPIEELEDRVFVQCNTSIYRASSLSNCRHTSSVEE

SEQ ID NO: 1926 - protein, 42 aa, Artificial Sequence
  chemically synthesized
SQVSPFKMPIEELEDRVFVQCNTSIYRASSLSNCRHTSSVEE

SEQ ID NO: 1927 - protein, 42 aa, Artificial Sequence; identical to SEQ ID NO: 894
  chemically synthesized

SEQ ID NO: 1928 - protein, 42 aa, Artificial Sequence
  chemically synthesized
SQVSPFKIPHEELEDRVFVQCNTSIYRASSLSNCRHTSSVEE

SEQ ID NO: 1929 - protein, 42 aa, Artificial Sequence
  chemically synthesized
SQVSPFKIPVEELEDRVFVQCNTSIYRASSLSNCRHTSSVEE

SEQ ID NO: 1930 - protein, 42 aa, Artificial Sequence
  chemically synthesized
SQVSPFKIPFEELEDRVFVQCNTSIYRASSLSNCRHTSSVEE

SEQ ID NO: 1931 - protein, 42 aa, Artificial Sequence
  chemically synthesized
SQVSPFKIPMEELEDRVFVQCNTSIYRASSLSNCRHTSSVEE

SEQ ID NO: 1932 - protein, 42 aa, Artificial Sequence; identical to SEQ ID NO: 1014
  chemically synthesized

SEQ ID NO: 1933 - protein, 42 aa, Artificial Sequence
  chemically synthesized
  misc_feature (11)..(11): Xaa can be a proteinogenic, non-proteinogenic or synthetic amino acid like ornithin or selenocystein
SQVSPFKIPIXELEDRVFVQCNTSIYRASSLSNCRHTSSVEE

SEQ ID NO: 1934 - protein, 42 aa, Artificial Sequence; identical to SEQ ID NO: 1134
  chemically synthesized

SEQ ID NO: 1935 - protein, 42 aa, Artificial Sequence
  chemically synthesized
  misc_feature (12)..(12): Xaa can be a proteinogenic, non-proteinogenic or synthetic amino acid like ornithin or selenocystein
SQVSPFKIPIEXLEDRVFVQCNTSIYRASSLSNCRHTSSVEE

SEQ ID NO: 1936 - protein, 42 aa, Artificial Sequence
  chemically synthesized
SQVSPFKIPIEEVEDRVFVQCNTSIYRASSLSNCRHTSSVEE

SEQ ID NO: 1937 - protein, 42 aa, Artificial Sequence; identical to SEQ ID NO: 1251
  chemically synthesized

SEQ ID NO: 1938 - protein, 42 aa, Artificial Sequence
  chemically synthesized
SQVSPFKIPIEEFEDRVFVQCNTSIYRASSLSNCRHTSSVEE

SEQ ID NO: 1939 - protein, 42 aa, Artificial Sequence
  chemically synthesized
SQVSPFKIPIEEHEDRVFVQCNTSIYRASSLSNCRHTSSVEE

SEQ ID NO: 1940 - protein, 42 aa, Artificial Sequence
  chemically synthesized
SQVSPFKIPIEEMEDRVFVQCNTSIYRASSLSNCRHTSSVEE

SEQ ID NO: 1941 - protein, 42 aa, Artificial Sequence; identical to SEQ ID NO: 1371
  chemically synthesized

SEQ ID NO: 1942 - protein, 42 aa, Artificial Sequence
  chemically synthesized
  misc_feature (14)..(14): Xaa can be a proteinogenic, non-proteinogenic or synthetic amino acid like ornithin or selenocystein
SQVSPFKIPIEELXDRVFVQCNTSIYRASSLSNCRHTSSVEE

SEQ ID NO: 1943 - protein, 42 aa, Artificial Sequence
  chemically synthesized
  misc_feature (15)..(15): Xaa can be a proteinogenic, non-proteinogenic or synthetic amino acid like ornithin or selenocystein
SQVSPFKIPIEELEXRVFVQCNTSIYRASSLSNCRHTSSVEE

SEQ ID NO: 1944 - protein, 42 aa, Artificial Sequence
  chemically synthesized
SQVSPFKIPIEELEERVFVQCNTSIYRASSLSNCRHTSSVEE

SEQ ID NO: 1945 - protein, 42 aa, Artificial Sequence; identical to SEQ ID NO: 1490
  chemically synthesized

SEQ ID NO: 1946 - protein, 42 aa, Artificial Sequence
  chemically synthesized
SQVSPFKIPIEELEDHVFVQCNTSIYRASSLSNCRHTSSVEE

SEQ ID NO: 1947 - protein, 42 aa, Artificial Sequence
  chemically synthesized
  misc_feature (16)..(16): Xaa can be a proteinogenic, non-proteinogenic or synthetic amino acid like ornithin or selenocystein
SQVSPFKIPIEELEDXVFVQCNTSIYRASSLSNCRHTSSVEE

SEQ ID NO: 1948 - protein, 42 aa, Artificial Sequence; identical to SEQ ID NO: 1607
  chemically synthesized

SEQ ID NO: 1949 - protein, 42 aa, Artificial Sequence
  chemically synthesized
SQVSPFKIPIEELEDRLFVQCNTSIYRASSLSNCRHTSSVEE

SEQ ID NO: 1950 - protein, 42 aa, Artificial Sequence
  chemically synthesized
SQVSPFKIPIEELEDRFFVQCNTSIYRASSLSNCRHTSSVEE

SEQ ID NO: 1951 - protein, 42 aa, Artificial Sequence
  chemically synthesized
SQVSPFKIPIEELEDRHFVQCNTSIYRASSLSNCRHTSSVEE

SEQ ID NO: 1952 - protein, 42 aa, Artificial Sequence
  chemically synthesized
SQVSPFKIPIEELEDRMFVQCNTSIYRASSLSNCRHTSSVEE

SEQ ID NO: 1953 - protein, 42 aa, Artificial Sequence; identical to SEQ ID NO: 1724
  chemically synthesized

SEQ ID NO: 1954 - protein, 42 aa, Artificial Sequence
  chemically synthesized
SQVSPFKIPIEELEDRVLVQCNTSIYRASSLSNCRHTSSVEE

SEQ ID NO: 1955 - protein, 42 aa, Artificial Sequence
  chemically synthesized
SQVSPFKIPIEELEDRVVVQCNTSIYRASSLSNCRHTSSVEE

SEQ ID NO: 1956 - protein, 42 aa, Artificial Sequence
  chemically synthesized
SQVSPFKIPIEELEDRVHVQCNTSIYRASSLSNCRHTSSVEE

SEQ ID NO: 1957 - protein, 42 aa, Artificial Sequence
  chemically synthesized
SQVSPFKIPIEELEDRVMVQCNTSIYRASSLSNCRHTSSVEE

SEQ ID NO: 1958 - protein, 42 aa, Artificial Sequence; identical to SEQ ID NO: 1841
  chemically synthesized

SEQ ID NO: 1959 - protein, 42 aa, Artificial Sequence
  chemically synthesized
SQVSPFKIPIEELEDRVFLQCNTSIYRASSLSNCRHTSSVEE

SEQ ID NO: 1960 - protein, 42 aa, Artificial Sequence
  chemically synthesized
SQVSPFKIPIEELEDRVFFQCNTSIYRASSLSNCRHTSSVEE

SEQ ID NO: 1961 - protein, 42 aa, Artificial Sequence
  chemically synthesized
SQVSPFKIPIEELEDRVFHQCNTSIYRASSLSNCRHTSSVEE

SEQ ID NO: 1962 - protein, 42 aa, Artificial Sequence
  chemically synthesized
SQVSPFKIPIEELEDRVFMQCNTSIYRASSLSNCRHTSSVEE

SEQ ID NO: 1963 - protein, 42 aa, Artificial Sequence
  chemically synthesized
SQVSPFKIPIEELEDRVFVQSNTSIYRASSLSNCRHTSSVEE

SEQ ID NO: 1964 - protein, 42 aa, Artificial Sequence
  chemically synthesized
SQVSPFKIPIEELEDRVFVQGNTSIYRASSLSNCRHTSSVEE

SEQ ID NO: 1965 - protein, 42 aa, Artificial Sequence
  chemically synthesized
SQVSPFKIPIEELEDRVFVQANTSIYRASSLSNCRHTSSVEE

SEQ ID NO: 1966 - protein, 42 aa, Artificial Sequence
  chemically synthesized
SQVSPFKIPIEELEDRVFVQCQTSIYRASSLSNCRHTSSVEE

SEQ ID NO: 1967 - protein, 42 aa, Artificial Sequence
  chemically synthesized
SQVSPFKIPIEELEDRVFVQCNSSIYRASSLSNCRHTSSVEE

SEQ ID NO: 1968 - protein, 42 aa, Artificial Sequence
  chemically synthesized
SQVSPFKIPIEELEDRVFVQCNYSIYRASSLSNCRHTSSVEE

SEQ ID NO: 1969 - protein, 42 aa, Artificial Sequence
  chemically synthesized
SQVSPFKIPIEELEDRVFVQCNTTIYRASSLSNCRHTSSVEE

SEQ ID NO: 1970 - protein, 42 aa, Artificial Sequence
  chemically synthesized
SQVSPFKIPIEELEDRVFVQCNTYIYRASSLSNCRHTSSVEE

SEQ ID NO: 1971 - protein, 42 aa, Artificial Sequence
  chemically synthesized
SQVSPFKIPIEELEDRVFVQCNTSVYRASSLSNCRHTSSVEE

SEQ ID NO: 1972 - protein, 42 aa, Artificial Sequence
  chemically synthesized
SQVSPFKIPIEELEDRVFVQCNTSLYRASSLSNCRHTSSVEE

SEQ ID NO: 1973 - protein, 42 aa, Artificial Sequence
  chemically synthesized
SQVSPFKIPIEELEDRVFVQCNTSHYRASSLSNCRHTSSVEE

SEQ ID NO: 1974 - protein, 42 aa, Artificial Sequence
  chemically synthesized
SQVSPFKIPIEELEDRVFVQCNTSFYRASSLSNCRHTSSVEE

SEQ ID NO: 1975 - protein, 42 aa, Artificial Sequence
  chemically synthesized
SQVSPFKIPIEELEDRVFVQCNTSMYRASSLSNCRHTSSVEE

SEQ ID NO: 1976 - protein, 42 aa, Artificial Sequence
  chemically synthesized
SQVSPFKIPIEELEDRVFVQCNTSIWRASSLSNCRHTSSVEE

SEQ ID NO: 1977 - protein, 42 aa, Artificial Sequence
  chemically synthesized
SQVSPFKIPIEELEDRVFVQCNTSIFRASSLSNCRHTSSVEE

SEQ ID NO: 1978 - protein, 42 aa, Artificial Sequence
  chemically synthesized
SQVSPFKIPIEELEDRVFVQCNTSISRASSLSNCRHTSSVEE

SEQ ID NO: 1979 - protein, 42 aa, Artificial Sequence
  chemically synthesized
SQVSPFKIPIEELEDRVFVQCNTSITRASSLSNCRHTSSVEE

SEQ ID NO: 1980 - protein, 42 aa, Artificial Sequence
  chemically synthesized
  misc_feature (27)..(27): Xaa can be a proteinogenic, non-proteinogenic or synthetic amino acid like ornithin or selenocystein
SQVSPFKIPIEELEDRVFVQCNTSIYXASSLSNCRHTSSVEE

SEQ ID NO: 1981 - protein, 42 aa, Artificial Sequence
  chemically synthesized
SQVSPFKIPIEELEDRVFVQCNTSIYHASSLSNCRHTSSVEE

SEQ ID NO: 1982 - protein, 42 aa, Artificial Sequence
  chemically synthesized
SQVSPFKIPIEELEDRVFVQCNTSIYKASSLSNCRHTSSVEE

SEQ ID NO: 1983 - protein, 42 aa, Artificial Sequence
  chemically synthesized
SQVSPFKIPIEELEDRVFVQCNTSIYRGSSLSNCRHTSSVEE

SEQ ID NO: 1984 - protein, 42 aa, Artificial Sequence
  chemically synthesized
SQVSPFKIPIEELEDRVFVQCNTSIYRATSLSNCRHTSSVEE

SEQ ID NO: 1985 - protein, 42 aa, Artificial Sequence
  chemically synthesized
SQVSPFKIPIEELEDRVFVQCNTSIYRAYSLSNCRHTSSVEE

SEQ ID NO: 1986 - protein, 42 aa, Artificial Sequence
  chemically synthesized
SQVSPFKIPIEELEDRVFVQCNTSIYRASTLSNCRHTSSVEE

SEQ ID NO: 1987 - protein, 42 aa, Artificial Sequence
  chemically synthesized
SQVSPFKIPIEELEDRVFVQCNTSIYRASYLSNCRHTSSVEE

SEQ ID NO: 1988 - protein, 42 aa, Artificial Sequence
  chemically synthesized
SQVSPFKIPIEELEDRVFVQCNTSIYRASSISNCRHTSSVEE

SEQ ID NO: 1989 - protein, 42 aa, Artificial Sequence
  chemically synthesized
SQVSPFKIPIEELEDRVFVQCNTSIYRASSVSNCRHTSSVEE

SEQ ID NO: 1990 - protein, 42 aa, Artificial Sequence
  chemically synthesized
SQVSPFKIPIEELEDRVFVQCNTSIYRASSFSNCRHTSSVEE

SEQ ID NO: 1991 - protein, 42 aa, Artificial Sequence
  chemically synthesized
SQVSPFKIPIEELEDRVFVQCNTSIYRASSMSNCRHTSSVEE

SEQ ID NO: 1992 - protein, 42 aa, Artificial Sequence
  chemically synthesized
SQVSPFKIPIEELEDRVFVQCNTSIYRASSHSNCRHTSSVEE

SEQ ID NO: 1993 - protein, 42 aa, Artificial Sequence
  chemically synthesized
SQVSPFKIPIEELEDRVFVQCNTSIYRASSLTNCRHTSSVEE

SEQ ID NO: 1994 - protein, 42 aa, Artificial Sequence
  chemically synthesized
SQVSPFKIPIEELEDRVFVQCNTSIYRASSLYNCRHTSSVEE

SEQ ID NO: 1995 - protein, 42 aa, Artificial Sequence
  chemically synthesized
SQVSPFKIPIEELEDRVFVQCNTSIYRASSLSQCRHTSSVEE

SEQ ID NO: 1996 - protein, 42 aa, Artificial Sequence
  chemically synthesized
SQVSPFKIPIEELEDRVFVQCNTSIYRASSLSNSRHTSSVEE

SEQ ID NO: 1997 - protein, 42 aa, Artificial Sequence
  chemically synthesized
SQVSPFKIPIEELEDRVFVQCNTSIYRASSLSNGRHTSSVEE

SEQ ID NO: 1998 - protein, 42 aa, Artificial Sequence
  chemically synthesized
SQVSPFKIPIEELEDRVFVQCNTSIYRASSLSNARHTSSVEE

SEQ ID NO: 1999 - protein, 42 aa, Artificial Sequence
  chemically synthesized
  misc_feature (35)..(35): Xaa can be a proteinogenic, non-proteinogenic or synthetic amino acid like ornithin or selenocystein
SQVSPFKIPIEELEDRVFVQCNTSIYRASSLSNCXHTSSVEE

SEQ ID NO: 2000 - protein, 42 aa, Artificial Sequence
  chemically synthesized
SQVSPFKIPIEELEDRVFVQCNTSIYRASSLSNCHHTSSVEE

SEQ ID NO: 2001 - protein, 42 aa, Artificial Sequence
  chemically synthesized
SQVSPFKIPIEELEDRVFVQCNTSIYRASSLSNCKHTSSVEE

SEQ ID NO: 2002 - protein, 42 aa, Artificial Sequence
  chemically synthesized
SQVSPFKIPIEELEDRVFVQCNTSIYRASSLSNCRGTSSVEE

SEQ ID NO: 2003 - protein, 42 aa, Artificial Sequence
  chemically synthesized
SQVSPFKIPIEELEDRVFVQCNTSIYRASSLSNCRATSSVEE

SEQ ID NO: 2004 - protein, 42 aa, Artificial Sequence
  chemically synthesized
SQVSPFKIPIEELEDRVFVQCNTSIYRASSLSNCRITSSVEE

SEQ ID NO: 2005 - protein, 42 aa, Artificial Sequence
  chemically synthesized
SQVSPFKIPIEELEDRVFVQCNTSIYRASSLSNCRLTSSVEE

SEQ ID NO: 2006 - protein, 42 aa, Artificial Sequence
  chemically synthesized
SQVSPFKIPIEELEDRVFVQCNTSIYRASSLSNCRMTSSVEE

SEQ ID NO: 2007 - protein, 42 aa, Artificial Sequence
  chemically synthesized
SQVSPFKIPIEELEDRVFVQCNTSIYRASSLSNCRVTSSVEE

SEQ ID NO: 2008 - protein, 42 aa, Artificial Sequence
  chemically synthesized
SQVSPFKIPIEELEDRVFVQCNTSIYRASSLSNCRHSSSVEE

SEQ ID NO: 2009 - protein, 42 aa, Artificial Sequence
  chemically synthesized
SQVSPFKIPIEELEDRVFVQCNTSIYRASSLSNCRHYSSVEE

SEQ ID NO: 2010 - protein, 42 aa, Artificial Sequence
  chemically synthesized
SQVSPFKIPIEELEDRVFVQCNTSIYRASSLSNCRHTTSVEE

SEQ ID NO: 2011 - protein, 42 aa, Artificial Sequence
  chemically synthesized
SQVSPFKIPIEELEDRVFVQCNTSIYRASSLSNCRHTYSVEE

SEQ ID NO: 2012 - protein, 42 aa, Artificial Sequence
  chemically synthesized
SQVSPFKIPIEELEDRVFVQCNTSIYRASSLSNCRHTSTVEE

SEQ ID NO: 2013 - protein, 42 aa, Artificial Sequence
  chemically synthesized
SQVSPFKIPIEELEDRVFVQCNTSIYRASSLSNCRHTSYVEE

SEQ ID NO: 2014 - protein, 42 aa, Artificial Sequence
  chemically synthesized
SQVSPFKIPIEELEDRVFVQCNTSIYRASSLSNCRHTSSIEE

SEQ ID NO: 2015 - protein, 42 aa, Artificial Sequence
  chemically synthesized
SQVSPFKIPIEELEDRVFVQCNTSIYRASSLSNCRHTSSLEE

SEQ ID NO: 2016 - protein, 42 aa, Artificial Sequence
  chemically synthesized
SQVSPFKIPIEELEDRVFVQCNTSIYRASSLSNCRHTSSFEE

SEQ ID NO: 2017 - protein, 42 aa, Artificial Sequence
  chemically synthesized
SQVSPFKIPIEELEDRVFVQCNTSIYRASSLSNCRHTSSHEE

SEQ ID NO: 2018 - protein, 42 aa, Artificial Sequence
  chemically synthesized
SQVSPFKIPIEELEDRVFVQCNTSIYRASSLSNCRHTSSMEE

SEQ ID NO: 2019 - protein, 42 aa, Artificial Sequence
  chemically synthesized
SQVSPFKIPIEELEDRVFVQCNTSIYRASSLSNCRHTSSVDE

SEQ ID NO: 2020 - protein, 42 aa, Artificial Sequence
  chemically synthesized
  misc_feature (41)..(41): Xaa can be a proteinogenic, non-proteinogenic or synthetic amino acid like ornithin or selenocystein
SQVSPFKIPIEELEDRVFVQCNTSIYRASSLSNCRHTSSVXE

SEQ ID NO: 2021 - protein, 42 aa, Artificial Sequence
  chemically synthesized
SQVSPFKIPIEELEDRVFVQCNTSIYRASSLSNCRHTSSVED

SEQ ID NO: 2022 - protein, 42 aa, Artificial Sequence
  chemically synthesized
  misc_feature (42)..(42): Xaa can be a proteinogenic, non-proteinogenic or synthetic amino acid like ornithin or selenocystein
SQVSPFKIPIEELEDRVFVQCNTSIYRASSLSNCRHTSSVEX

SEQ ID NO: 2023 - protein, 42 aa, Artificial Sequence
  chemically synthesized
SQVSAFKIPIEELEDRVFVQCNTSIYRASSLSNCRHTSSVEE

SEQ ID NO: 2024 - protein, 42 aa, Artificial Sequence
  chemically synthesized
SQVSGFKIPIEELEDRVFVQCNTSIYRASSLSNCRHTSSVEE

SEQ ID NO: 2025 - protein, 42 aa, Artificial Sequence
  chemically synthesized
SQVSPFKIAIEELEDRVFVQCNTSIYRASSLSNCRHTSSVEE

SEQ ID NO: 2026 - protein, 42 aa, Artificial Sequence
  chemically synthesized
SQVSPFKIGIEELEDRVFVQCNTSIYRASSLSNCRHTSSVEE

SEQ ID NO: 2027 - protein, 42 aa, Artificial Sequence
  chemically synthesized
SQVSPFKIPIEELEDRVFVNSNTSIYRASSLSNSRHTSSVEE

SEQ ID NO: 2028 - protein, 42 aa, Artificial Sequence
  chemically synthesized
TQVSPFKIPIEELEDRVFVNSNTSIYRASSLSNSRHTSSVEE

SEQ ID NO: 2029 - protein, 42 aa, Artificial Sequence
  chemically synthesized
YQVSPFKIPIEELEDRVFVNSNTSIYRASSLSNSRHTSSVEE

SEQ ID NO: 2030 - protein, 42 aa, Artificial Sequence
  chemically synthesized
SNVSPFKIPIEELEDRVFVNSNTSIYRASSLSNSRHTSSVEE

SEQ ID NO: 2031 - protein, 42 aa, Artificial Sequence
  chemically synthesized
SQLSPFKIPIEELEDRVFVNSNTSIYRASSLSNSRHTSSVEE

SEQ ID NO: 2032 - protein, 42 aa, Artificial Sequence
  chemically synthesized
SQISPFKIPIEELEDRVFVNSNTSIYRASSLSNSRHTSSVEE

SEQ ID NO: 2033 - protein, 42 aa, Artificial Sequence
  chemically synthesized
SQPSPFKIPIEELEDRVFVNSNTSIYRASSLSNSRHTSSVEE

SEQ ID NO: 2034 - protein, 42 aa, Artificial Sequence
  chemically synthesized
SQFSPFKIPIEELEDRVFVNSNTSIYRASSLSNSRHTSSVEE

SEQ ID NO: 2035 - protein, 42 aa, Artificial Sequence
  chemically synthesized
SQVTPFKIPIEELEDRVFVNSNTSIYRASSLSNSRHTSSVEE

SEQ ID NO: 2036 - protein, 42 aa, Artificial Sequence
  chemically synthesized
SQVYPFKIPIEELEDRVFVNSNTSIYRASSLSNSRHTSSVEE

SEQ ID NO: 2037 - protein, 42 aa, Artificial Sequence
  chemically synthesized
SQVSPWKIPIEELEDRVFVNSNTSIYRASSLSNSRHTSSVEE

SEQ ID NO: 2038 - protein, 42 aa, Artificial Sequence
  chemically synthesized
SQVSPYKIPIEELEDRVFVNSNTSIYRASSLSNSRHTSSVEE

SEQ ID NO: 2039 - protein, 42 aa, Artificial Sequence
  chemically synthesized
SQVSPHKIPIEELEDRVFVNSNTSIYRASSLSNSRHTSSVEE

SEQ ID NO: 2040 - protein, 42 aa, Artificial Sequence
  chemically synthesized
SQVSPFRIPIEELEDRVFVNSNTSIYRASSLSNSRHTSSVEE

SEQ ID NO: 2041 - protein, 42 aa, Artificial Sequence
  chemically synthesized
SQVSPFHIPIEELEDRVFVNSNTSIYRASSLSNSRHTSSVEE

SEQ ID NO: 2042 - protein, 42 aa, Artificial Sequence
  chemically synthesized
  misc_feature (7)..(7): Xaa can be a proteinogenic, non-proteinogenic or synthetic amino acid like ornithin or selenocystein
SQVSPFXIPIEELEDRVFVNSNTSIYRASSLSNSRHTSSVEE

SEQ ID NO: 2043 - protein, 42 aa, Artificial Sequence
  chemically synthesized
SQVSPFKLPIEELEDRVFVNSNTSIYRASSLSNSRHTSSVEE

SEQ ID NO: 2044 - protein, 42 aa, Artificial Sequence
  chemically synthesized
SQVSPFKHPIEELEDRVFVNSNTSIYRASSLSNSRHTSSVEE

SEQ ID NO: 2045 - protein, 42 aa, Artificial Sequence
  chemically synthesized
SQVSPFKVPIEELEDRVFVNSNTSIYRASSLSNSRHTSSVEE

SEQ ID NO: 2046 - protein, 42 aa, Artificial Sequence
  chemically synthesized
SQVSPFKFPIEELEDRVFVNSNTSIYRASSLSNSRHTSSVEE

SEQ ID NO: 2047 - protein, 42 aa, Artificial Sequence
  chemically synthesized
SQVSPFKMPIEELEDRVFVNSNTSIYRASSLSNSRHTSSVEE

SEQ ID NO: 2048 - protein, 42 aa, Artificial Sequence
  chemically synthesized
SQVSPFKIPLEELEDRVFVNSNTSIYRASSLSNSRHTSSVEE

SEQ ID NO: 2049 - protein, 42 aa, Artificial Sequence
  chemically synthesized
SQVSPFKIPHEELEDRVFVNSNTSIYRASSLSNSRHTSSVEE

SEQ ID NO: 2050 - protein, 42 aa, Artificial Sequence
  chemically synthesized
SQVSPFKIPVEELEDRVFVNSNTSIYRASSLSNSRHTSSVEE

SEQ ID NO: 2051 - protein, 42 aa, Artificial Sequence
  chemically synthesized
SQVSPFKIPFEELEDRVFVNSNTSIYRASSLSNSRHTSSVEE

SEQ ID NO: 2052 - protein, 42 aa, Artificial Sequence
  chemically synthesized
SQVSPFKIPMEELEDRVFVNSNTSIYRASSLSNSRHTSSVEE

SEQ ID NO: 2053 - protein, 42 aa, Artificial Sequence
  chemically synthesized
SQVSPFKIPIDELEDRVFVNSNTSIYRASSLSNSRHTSSVEE

SEQ ID NO: 2054 - protein, 42 aa, Artificial Sequence
  chemically synthesized
  misc_feature (11)..(11): Xaa can be a proteinogenic, non-proteinogenic or synthetic amino acid like ornithin or selenocystein
SQVSPFKIPIXELEDRVFVNSNTSIYRASSLSNSRHTSSVEE

SEQ ID NO: 2055 - protein, 42 aa, Artificial Sequence
  chemically synthesized
SQVSPFKIPIEDLEDRVFVNSNTSIYRASSLSNSRHTSSVEE

SEQ ID NO: 2056 - protein, 42 aa, Artificial Sequence
  chemically synthesized
  misc_feature (12)..(12): Xaa can be a proteinogenic, non-proteinogenic or synthetic amino acid like ornithin or selenocystein
SQVSPFKIPIEXLEDRVFVNSNTSIYRASSLSNSRHTSSVEE

SEQ ID NO: 2057 - protein, 42 aa, Artificial Sequence
  chemically synthesized
SQVSPFKIPIEEVEDRVFVNSNTSIYRASSLSNSRHTSSVEE

SEQ ID NO: 2058 - protein, 42 aa, Artificial Sequence
  chemically synthesized
SQVSPFKIPIEEIEDRVFVNSNTSIYRASSLSNSRHTSSVEE

SEQ ID NO: 2059 - protein, 42 aa, Artificial Sequence
  chemically synthesized
SQVSPFKIPIEEFEDRVFVNSNTSIYRASSLSNSRHTSSVEE

SEQ ID NO: 2060 - protein, 42 aa, Artificial Sequence
  chemically synthesized
SQVSPFKIPIEEHEDRVFVNSNTSIYRASSLSNSRHTSSVEE

SEQ ID NO: 2061 - protein, 42 aa, Artificial Sequence
  chemically synthesized
SQVSPFKIPIEEMEDRVFVNSNTSIYRASSLSNSRHTSSVEE

SEQ ID NO: 2062 - protein, 42 aa, Artificial Sequence
  chemically synthesized
SQVSPFKIPIEELDDRVFVNSNTSIYRASSLSNSRHTSSVEE

SEQ ID NO: 2063 - protein, 42 aa, Artificial Sequence
  chemically synthesized
  misc_feature (14)..(14): Xaa can be a proteinogenic, non-proteinogenic or synthetic amino acid like ornithin or selenocystein
SQVSPFKIPIEELXDRVFVNSNTSIYRASSLSNSRHTSSVEE

SEQ ID NO: 2064 - protein, 42 aa, Artificial Sequence
  chemically synthesized
  misc_feature (15)..(15): Xaa can be a proteinogenic, non-proteinogenic or synthetic amino acid like ornithin or selenocystein
SQVSPFKIPIEELEXRVFVNSNTSIYRASSLSNSRHTSSVEE

SEQ ID NO: 2065 - protein, 42 aa, Artificial Sequence
  chemically synthesized
SQVSPFKIPIEELEERVFVNSNTSIYRASSLSNSRHTSSVEE

SEQ ID NO: 2066 - protein, 42 aa, Artificial Sequence
  chemically synthesized
SQVSPFKIPIEELEDKVFVNSNTSIYRASSLSNSRHTSSVEE

SEQ ID NO: 2067 - protein, 42 aa, Artificial Sequence
  chemically synthesized
SQVSPFKIPIEELEDHVFVNSNTSIYRASSLSNSRHTSSVEE

SEQ ID NO: 2068 - protein, 42 aa, Artificial Sequence
  chemically synthesized
  misc_feature (16)..(16): Xaa can be a proteinogenic, non-proteinogenic or synthetic amino acid like ornithin or selenocystein
SQVSPFKIPIEELEDXVFVNSNTSIYRASSLSNSRHTSSVEE

SEQ ID NO: 2069 - protein, 42 aa, Artificial Sequence
  chemically synthesized
SQVSPFKIPIEELEDRIFVNSNTSIYRASSLSNSRHTSSVEE

SEQ ID NO: 2070 - protein, 42 aa, Artificial Sequence
  chemically synthesized
SQVSPFKIPIEELEDRLFVNSNTSIYRASSLSNSRHTSSVEE

SEQ ID NO: 2071 - protein, 42 aa, Artificial Sequence
  chemically synthesized
SQVSPFKIPIEELEDRFFVNSNTSIYRASSLSNSRHTSSVEE

SEQ ID NO: 2072 - protein, 42 aa, Artificial Sequence
  chemically synthesized
SQVSPFKIPIEELEDRHFVNSNTSIYRASSLSNSRHTSSVEE

SEQ ID NO: 2073 - protein, 42 aa, Artificial Sequence
  chemically synthesized
SQVSPFKIPIEELEDRMFVNSNTSIYRASSLSNSRHTSSVEE

SEQ ID NO: 2074 - protein, 42 aa, Artificial Sequence
  chemically synthesized
SQVSPFKIPIEELEDRVIVNSNTSIYRASSLSNSRHTSSVEE

SEQ ID NO: 2075 - protein, 42 aa, Artificial Sequence
  chemically synthesized
SQVSPFKIPIEELEDRVLVNSNTSIYRASSLSNSRHTSSVEE

SEQ ID NO: 2076 - protein, 42 aa, Artificial Sequence
  chemically synthesized
SQVSPFKIPIEELEDRVVVNSNTSIYRASSLSNSRHTSSVEE

SEQ ID NO: 2077 - protein, 42 aa, Artificial Sequence
  chemically synthesized
SQVSPFKIPIEELEDRVHVNSNTSIYRASSLSNSRHTSSVEE

SEQ ID NO: 2078 - protein, 42 aa, Artificial Sequence
  chemically synthesized
SQVSPFKIPIEELEDRVMVNSNTSIYRASSLSNSRHTSSVEE

SEQ ID NO: 2079 - protein, 42 aa, Artificial Sequence
  chemically synthesized
SQVSPFKIPIEELEDRVFINSNTSIYRASSLSNSRHTSSVEE

SEQ ID NO: 2080 - protein, 42 aa, Artificial Sequence
  chemically synthesized
SQVSPFKIPIEELEDRVFLNSNTSIYRASSLSNSRHTSSVEE

SEQ ID NO: 2081 - protein, 42 aa, Artificial Sequence
  chemically synthesized
SQVSPFKIPIEELEDRVFFNSNTSIYRASSLSNSRHTSSVEE

SEQ ID NO: 2082 - protein, 42 aa, Artificial Sequence
  chemically synthesized
SQVSPFKIPIEELEDRVFHNSNTSIYRASSLSNSRHTSSVEE

SEQ ID NO: 2083 - protein, 42 aa, Artificial Sequence
  chemically synthesized
SQVSPFKIPIEELEDRVFMNSNTSIYRASSLSNSRHTSSVEE

SEQ ID NO: 2084 - protein, 42 aa, Artificial Sequence
  chemically synthesized
SQVSPFKIPIEELEDRVFVQSNTSIYRASSLSNSRHTSSVEE

SEQ ID NO: 2085 - protein, 42 aa, Artificial Sequence
  chemically synthesized
SQVSPFKIPIEELEDRVFVNGNTSIYRASSLSNSRHTSSVEE

SEQ ID NO: 2086 - protein, 42 aa, Artificial Sequence
  chemically synthesized
SQVSPFKIPIEELEDRVFVNANTSIYRASSLSNSRHTSSVEE

SEQ ID NO: 2087 - protein, 42 aa, Artificial Sequence
  chemically synthesized
SQVSPFKIPIEELEDRVFVNSQTSIYRASSLSNSRHTSSVEE

SEQ ID NO: 2088 - protein, 42 aa, Artificial Sequence
  chemically synthesized
SQVSPFKIPIEELEDRVFVNSNSSIYRASSLSNSRHTSSVEE

SEQ ID NO: 2089 - protein, 42 aa, Artificial Sequence
  chemically synthesized
SQVSPFKIPIEELEDRVFVNSNYSIYRASSLSNSRHTSSVEE

SEQ ID NO: 2090 - protein, 42 aa, Artificial Sequence
  chemically synthesized
SQVSPFKIPIEELEDRVFVNSNTTIYRASSLSNSRHTSSVEE

SEQ ID NO: 2091 - protein, 42 aa, Artificial Sequence
  chemically synthesized
SQVSPFKIPIEELEDRVFVNSNTYIYRASSLSNSRHTSSVEE

SEQ ID NO: 2092 - protein, 42 aa, Artificial Sequence
  chemically synthesized
SQVSPFKIPIEELEDRVFVNSNTSVYRASSLSNSRHTSSVEE

SEQ ID NO: 2093 - protein, 42 aa, Artificial Sequence
  chemically synthesized
SQVSPFKIPIEELEDRVFVNSNTSLYRASSLSNSRHTSSVEE

SEQ ID NO: 2094 - protein, 42 aa, Artificial Sequence
  chemically synthesized
SQVSPFKIPIEELEDRVFVNSNTSHYRASSLSNSRHTSSVEE

SEQ ID NO: 2095 - protein, 42 aa, Artificial Sequence
  chemically synthesized
SQVSPFKIPIEELEDRVFVNSNTSFYRASSLSNSRHTSSVEE

SEQ ID NO: 2096 - protein, 42 aa, Artificial Sequence
  chemically synthesized
SQVSPFKIPIEELEDRVFVNSNTSMYRASSLSNSRHTSSVEE

SEQ ID NO: 2097 - protein, 42 aa, Artificial Sequence
  chemically synthesized
SQVSPFKIPIEELEDRVFVNSNTSIWRASSLSNSRHTSSVEE

SEQ ID NO: 2098 - protein, 42 aa, Artificial Sequence
  chemically synthesized
SQVSPFKIPIEELEDRVFVNSNTSIFRASSLSNSRHTSSVEE

SEQ ID NO: 2099 - protein, 42 aa, Artificial Sequence
  chemically synthesized
SQVSPFKIPIEELEDRVFVNSNTSISRASSLSNSRHTSSVEE

SEQ ID NO: 2100 - protein, 42 aa, Artificial Sequence
  chemically synthesized
SQVSPFKIPIEELEDRVFVNSNTSITRASSLSNSRHTSSVEE

SEQ ID NO: 2101 - protein, 42 aa, Artificial Sequence
  chemically synthesized
  misc_feature (27)..(27): Xaa can be a proteinogenic, non-proteinogenic or synthetic amino acid like ornithin or selenocystein
SQVSPFKIPIEELEDRVFVNSNTSIYXASSLSNSRHTSSVEE

SEQ ID NO: 2102 - protein, 42 aa, Artificial Sequence
  chemically synthesized
SQVSPFKIPIEELEDRVFVNSNTSIYHASSLSNSRHTSSVEE

SEQ ID NO: 2103 - protein, 42 aa, Artificial Sequence
  chemically synthesized
SQVSPFKIPIEELEDRVFVNSNTSIYKASSLSNSRHTSSVEE

SEQ ID NO: 2104 - protein, 42 aa, Artificial Sequence
  chemically synthesized
SQVSPFKIPIEELEDRVFVNSNTSIYRGSSLSNSRHTSSVEE

SEQ ID NO: 2105 - protein, 42 aa, Artificial Sequence
  chemically synthesized
SQVSPFKIPIEELEDRVFVNSNTSIYRATSLSNSRHTSSVEE

SEQ ID NO: 2106 - protein, 42 aa, Artificial Sequence
  chemically synthesized
SQVSPFKIPIEELEDRVFVNSNTSIYRAYSLSNSRHTSSVEE

SEQ ID NO: 2107 - protein, 42 aa, Artificial Sequence
  chemically synthesized
SQVSPFKIPIEELEDRVFVNSNTSIYRASTLSNSRHTSSVEE

SEQ ID NO: 2108 - protein, 42 aa, Artificial Sequence
  chemically synthesized
SQVSPFKIPIEELEDRVFVNSNTSIYRASYLSNSRHTSSVEE

SEQ ID NO: 2109 - protein, 42 aa, Artificial Sequence
  chemically synthesized
SQVSPFKIPIEELEDRVFVNSNTSIYRASSISNSRHTSSVEE

SEQ ID NO: 2110 - protein, 42 aa, Artificial Sequence
  chemically synthesized
SQVSPFKIPIEELEDRVFVNSNTSIYRASSVSNSRHTSSVEE

SEQ ID NO: 2111 - protein, 42 aa, Artificial Sequence
  chemically synthesized
SQVSPFKIPIEELEDRVFVNSNTSIYRASSFSNSRHTSSVEE

SEQ ID NO: 2112 - protein, 42 aa, Artificial Sequence
  chemically synthesized
SQVSPFKIPIEELEDRVFVNSNTSIYRASSMSNSRHTSSVEE

SEQ ID NO: 2113 - protein, 42 aa, Artificial Sequence
  chemically synthesized
SQVSPFKIPIEELEDRVFVNSNTSIYRASSHSNSRHTSSVEE

SEQ ID NO: 2114 - protein, 42 aa, Artificial Sequence
  chemically synthesized
SQVSPFKIPIEELEDRVFVNSNTSIYRASSLTNSRHTSSVEE

SEQ ID NO: 2115 - protein, 42 aa, Artificial Sequence
  chemically synthesized
SQVSPFKIPIEELEDRVFVNSNTSIYRASSLYNSRHTSSVEE

SEQ ID NO: 2116 - protein, 42 aa, Artificial Sequence
  chemically synthesized
SQVSPFKIPIEELEDRVFVNSNTSIYRASSLSQSRHTSSVEE

SEQ ID NO: 2117 - protein, 42 aa, Artificial Sequence
  chemically synthesized
SQVSPFKIPIEELEDRVFVNSNTSIYRASSLSNGRHTSSVEE

SEQ ID NO: 2118 - protein, 42 aa, Artificial Sequence
  chemically synthesized
SQVSPFKIPIEELEDRVFVNSNTSIYRASSLSNARHTSSVEE

SEQ ID NO: 2119 - protein, 42 aa, Artificial Sequence
  chemically synthesized
  misc_feature (35)..(35): Xaa can be a proteinogenic, non-proteinogenic or synthetic amino acid like ornithin or selenocystein
SQVSPFKIPIEELEDRVFVNSNTSIYRASSLSNSXHTSSVEE

SEQ ID NO: 2120 - protein, 42 aa, Artificial Sequence
  chemically synthesized
SQVSPFKIPIEELEDRVFVNSNTSIYRASSLSNSHHTSSVEE

SEQ ID NO: 2121 - protein, 42 aa, Artificial Sequence
  chemically synthesized
SQVSPFKIPIEELEDRVFVNSNTSIYRASSLSNSKHTSSVEE

SEQ ID NO: 2122 - protein, 42 aa, Artificial Sequence
  chemically synthesized
SQVSPFKIPIEELEDRVFVNSNTSIYRASSLSNSRGTSSVEE

SEQ ID NO: 2123 - protein, 42 aa, Artificial Sequence
  chemically synthesized
SQVSPFKIPIEELEDRVFVNSNTSIYRASSLSNSRATSSVEE

SEQ ID NO: 2124 - protein, 42 aa, Artificial Sequence
  chemically synthesized
SQVSPFKIPIEELEDRVFVNSNTSIYRASSLSNSRITSSVEE

SEQ ID NO: 2125 - protein, 42 aa, Artificial Sequence
  chemically synthesized
SQVSPFKIPIEELEDRVFVNSNTSIYRASSLSNSRLTSSVEE

SEQ ID NO: 2126 - protein, 42 aa, Artificial Sequence
  chemically synthesized
SQVSPFKIPIEELEDRVFVNSNTSIYRASSLSNSRMTSSVEE

SEQ ID NO: 2127 - protein, 42 aa, Artificial Sequence
  chemically synthesized
SQVSPFKIPIEELEDRVFVNSNTSIYRASSLSNSRVTSSVEE

SEQ ID NO: 2128 - protein, 42 aa, Artificial Sequence
  chemically synthesized
SQVSPFKIPIEELEDRVFVNSNTSIYRASSLSNSRHSSSVEE

SEQ ID NO: 2129 - protein, 42 aa, Artificial Sequence
  chemically synthesized
SQVSPFKIPIEELEDRVFVNSNTSIYRASSLSNSRHYSSVEE

SEQ ID NO: 2130 - protein, 42 aa, Artificial Sequence
  chemically synthesized
SQVSPFKIPIEELEDRVFVNSNTSIYRASSLSNSRHTTSVEE

SEQ ID NO: 2131 - protein, 42 aa, Artificial Sequence
  chemically synthesized
SQVSPFKIPIEELEDRVFVNSNTSIYRASSLSNSRHTYSVEE

SEQ ID NO: 2132 - protein, 42 aa, Artificial Sequence
  chemically synthesized
SQVSPFKIPIEELEDRVFVNSNTSIYRASSLSNSRHTSTVEE

SEQ ID NO: 2133 - protein, 42 aa, Artificial Sequence
  chemically synthesized
SQVSPFKIPIEELEDRVFVNSNTSIYRASSLSNSRHTSYVEE

SEQ ID NO: 2134 - protein, 42 aa, Artificial Sequence
  chemically synthesized
SQVSPFKIPIEELEDRVFVNSNTSIYRASSLSNSRHTSSIEE

SEQ ID NO: 2135 - protein, 42 aa, Artificial Sequence
  chemically synthesized
SQVSPFKIPIEELEDRVFVNSNTSIYRASSLSNSRHTSSLEE

SEQ ID NO: 2136 - protein, 42 aa, Artificial Sequence
  chemically synthesized
SQVSPFKIPIEELEDRVFVNSNTSIYRASSLSNSRHTSSFEE

SEQ ID NO: 2137 - protein, 42 aa, Artificial Sequence
  chemically synthesized
SQVSPFKIPIEELEDRVFVNSNTSIYRASSLSNSRHTSSHEE

SEQ ID NO: 2138 - protein, 42 aa, Artificial Sequence
  chemically synthesized
SQVSPFKIPIEELEDRVFVNSNTSIYRASSLSNSRHTSSMEE

SEQ ID NO: 2139 - protein, 42 aa, Artificial Sequence
  chemically synthesized
SQVSPFKIPIEELEDRVFVNSNTSIYRASSLSNSRHTSSVDE

SEQ ID NO: 2140 - protein, 42 aa, Artificial Sequence
  chemically synthesized
  misc_feature (41)..(41): Xaa can be a proteinogenic, non-proteinogenic or synthetic amino acid like ornithin or selenocystein
SQVSPFKIPIEELEDRVFVNSNTSIYRASSLSNSRHTSSVXE

SEQ ID NO: 2141 - protein, 42 aa, Artificial Sequence
  chemically synthesized
SQVSPFKIPIEELEDRVFVNSNTSIYRASSLSNSRHTSSVED

SEQ ID NO: 2142 - protein, 42 aa, Artificial Sequence
  chemically synthesized
  misc_feature (42)..(42): Xaa can be a proteinogenic, non-proteinogenic or synthetic amino acid like ornithin or selenocystein
SQVSPFKIPIEELEDRVFVNSNTSIYRASSLSNSRHTSSVEX

SEQ ID NO: 2143 - protein, 42 aa, Artificial Sequence
  chemically synthesized
SQVSAFKIPIEELEDRVFVNSNTSIYRASSLSNSRHTSSVEE

SEQ ID NO: 2144 - protein, 42 aa, Artificial Sequence
  chemically synthesized
SQVSGFKIPIEELEDRVFVNSNTSIYRASSLSNSRHTSSVEE

SEQ ID NO: 2145 - protein, 42 aa, Artificial Sequence
  chemically synthesized
SQVSPFKIAIEELEDRVFVNSNTSIYRASSLSNSRHTSSVEE

SEQ ID NO: 2146 - protein, 42 aa, Artificial Sequence
  chemically synthesized
SQVSPFKIGIEELEDRVFVNSNTSIYRASSLSNSRHTSSVEE

SEQ ID NO: 2147 - protein, 42 aa, Artificial Sequence; identical to SEQ ID NO: 65
  chemically synthesized

SEQ ID NO: 2148 - protein, 42 aa, Artificial Sequence; identical to SEQ ID NO: 184
  chemically synthesized

SEQ ID NO: 2149 - protein, 42 aa, Artificial Sequence
  chemically synthesized
YQVSPFKIPIEELEDRVFVNCQTSIYRASSLSNCRHTSSVEE

SEQ ID NO: 2150 - protein, 42 aa, Artificial Sequence; identical to SEQ ID NO: 304
  chemically synthesized

SEQ ID NO: 2151 - protein, 42 aa, Artificial Sequence; identical to SEQ ID NO: 422
  chemically synthesized

SEQ ID NO: 2152 - protein, 42 aa, Artificial Sequence
  chemically synthesized
SQISPFKIPIEELEDRVFVNCQTSIYRASSLSNCRHTSSVEE

SEQ ID NO: 2153 - protein, 42 aa, Artificial Sequence
  chemically synthesized
SQPSPFKIPIEELEDRVFVNCQTSIYRASSLSNCRHTSSVEE

SEQ ID NO: 2154 - protein, 42 aa, Artificial Sequence
  chemically synthesized
SQFSPFKIPIEELEDRVFVNCQTSIYRASSLSNCRHTSSVEE

SEQ ID NO: 2155 - protein, 42 aa, Artificial Sequence; identical to SEQ ID NO: 541
  chemically synthesized

SEQ ID NO: 2156 - protein, 42 aa, Artificial Sequence
  chemically synthesized
SQVYPFKIPIEELEDRVFVNCQTSIYRASSLSNCRHTSSVEE

SEQ ID NO: 2157 - protein, 42 aa, Artificial Sequence
  chemically synthesized
SQVSPWKIPIEELEDRVFVNCQTSIYRASSLSNCRHTSSVEE

SEQ ID NO: 2158 - protein, 42 aa, Artificial Sequence
  chemically synthesized
SQVSPYKIPIEELEDRVFVNCQTSIYRASSLSNCRHTSSVEE

SEQ ID NO: 2159 - protein, 42 aa, Artificial Sequence
  chemically synthesized
SQVSPHKIPIEELEDRVFVNCQTSIYRASSLSNCRHTSSVEE

SEQ ID NO: 2160 - protein, 42 aa, Artificial Sequence
  chemically synthesized
SQVSPFRIPIEELEDRVFVNCQTSIYRASSLSNCRHTSSVEE

SEQ ID NO: 2161 - protein, 42 aa, Artificial Sequence
  chemically synthesized
SQVSPFHIPIEELEDRVFVNCQTSIYRASSLSNCRHTSSVEE

SEQ ID NO: 2162 - protein, 42 aa, Artificial Sequence
  chemically synthesized
  misc_feature (7)..(7): Xaa can be a proteinogenic, non-proteinogenic or synthetic amino acid like ornithin or selenocystein
SQVSPFXIPIEELEDRVFVNCQTSIYRASSLSNCRHTSSVEE

SEQ ID NO: 2163 - protein, 42 aa, Artificial Sequence; identical to SEQ ID NO: 780
  chemically synthesized

SEQ ID NO: 2164 - protein, 42 aa, Artificial Sequence
  chemically synthesized
SQVSPFKHPIEELEDRVFVNCQTSIYRASSLSNCRHTSSVEE

SEQ ID NO: 2165 - protein, 42 aa, Artificial Sequence
  chemically synthesized
SQVSPFKVPIEELEDRVFVNCQTSIYRASSLSNCRHTSSVEE

SEQ ID NO: 2166 - protein, 42 aa, Artificial Sequence
  chemically synthesized
SQVSPFKFPIEELEDRVFVNCQTSIYRASSLSNCRHTSSVEE

SEQ ID NO: 2167 - protein, 42 aa, Artificial Sequence
  chemically synthesized
SQVSPFKMPIEELEDRVFVNCQTSIYRASSLSNCRHTSSVEE

SEQ ID NO: 2168 - protein, 42 aa, Artificial Sequence; identical to SEQ ID NO: 898
  chemically synthesized

SEQ ID NO: 2169 - protein, 42 aa, Artificial Sequence
  chemically synthesized
SQVSPFKIPHEELEDRVFVNCQTSIYRASSLSNCRHTSSVEE

SEQ ID NO: 2170 - protein, 42 aa, Artificial Sequence
  chemically synthesized
SQVSPFKIPVEELEDRVFVNCQTSIYRASSLSNCRHTSSVEE

SEQ ID NO: 2171 - protein, 42 aa, Artificial Sequence
  chemically synthesized
SQVSPFKIPFEELEDRVFVNCQTSIYRASSLSNCRHTSSVEE

SEQ ID NO: 2172 - protein, 42 aa, Artificial Sequence
  chemically synthesized
SQVSPFKIPMEELEDRVFVNCQTSIYRASSLSNCRHTSSVEE

SEQ ID NO: 2173 - protein, 42 aa, Artificial Sequence; identical to SEQ ID NO: 1018
  chemically synthesized

SEQ ID NO: 2174 - protein, 42 aa, Artificial Sequence
  chemically synthesized
  misc_feature (11)..(11): Xaa can be a proteinogenic, non-proteinogenic or synthetic amino acid like ornithin or selenocystein
SQVSPFKIPIXELEDRVFVNCQTSIYRASSLSNCRHTSSVEE

SEQ ID NO: 2175 - protein, 42 aa, Artificial Sequence; identical to SEQ ID NO: 1138
  chemically synthesized

SEQ ID NO: 2176 - protein, 42 aa, Artificial Sequence
  chemically synthesized
  misc_feature (12)..(12): Xaa can be a proteinogenic, non-proteinogenic or synthetic amino acid like ornithin or selenocystein
SQVSPFKIPIEXLEDRVFVNCQTSIYRASSLSNCRHTSSVEE

SEQ ID NO: 2177 - protein, 42 aa, Artificial Sequence
  chemically synthesized
SQVSPFKIPIEEVEDRVFVNCQTSIYRASSLSNCRHTSSVEE

SEQ ID NO: 2178 - protein, 42 aa, Artificial Sequence; identical to SEQ ID NO: 1255
  chemically synthesized

SEQ ID NO: 2179 - protein, 42 aa, Artificial Sequence
  chemically synthesized
SQVSPFKIPIEEFEDRVFVNCQTSIYRASSLSNCRHTSSVEE

SEQ ID NO: 2180 - protein, 42 aa, Artificial Sequence
  chemically synthesized
SQVSPFKIPIEEHEDRVFVNCQTSIYRASSLSNCRHTSSVEE

SEQ ID NO: 2181 - protein, 42 aa, Artificial Sequence
  chemically synthesized
SQVSPFKIPIEEMEDRVFVNCQTSIYRASSLSNCRHTSSVEE

SEQ ID NO: 2182 - protein, 42 aa, Artificial Sequence; identical to SEQ ID NO: 1375
  chemically synthesized

SEQ ID NO: 2183 - protein, 42 aa, Artificial Sequence
  chemically synthesized
  misc_feature (14)..(14): Xaa can be a proteinogenic, non-proteinogenic or synthetic amino acid like ornithin or selenocystein
SQVSPFKIPIEELXDRVFVNCQTSIYRASSLSNCRHTSSVEE

SEQ ID NO: 2184 - protein, 42 aa, Artificial Sequence
  chemically synthesized
  misc_feature (15)..(15): Xaa can be a proteinogenic, non-proteinogenic or synthetic amino acid like ornithin or selenocystein
SQVSPFKIPIEELEXRVFVNCQTSIYRASSLSNCRHTSSVEE

SEQ ID NO: 2185 - protein, 42 aa, Artificial Sequence
  chemically synthesized
SQVSPFKIPIEELEERVFVNCQTSIYRASSLSNCRHTSSVEE

SEQ ID NO: 2186 - protein, 42 aa, Artificial Sequence; identical to SEQ ID NO: 1494
  chemically synthesized

SEQ ID NO: 2187 - protein, 42 aa, Artificial Sequence
  chemically synthesized
SQVSPFKIPIEELEDHVFVNCQTSIYRASSLSNCRHTSSVEE

SEQ ID NO: 2188 - protein, 42 aa, Artificial Sequence
  chemically synthesized
  misc_feature (16)..(16): Xaa can be a proteinogenic, non-proteinogenic or synthetic amino acid like ornithin or selenocystein
SQVSPFKIPIEELEDXVFVNCQTSIYRASSLSNCRHTSSVEE

SEQ ID NO: 2189 - protein, 42 aa, Artificial Sequence; identical to SEQ ID NO: 1611
  chemically synthesized

SEQ ID NO: 2190 - protein, 42 aa, Artificial Sequence
  chemically synthesized
SQVSPFKIPIEELEDRLFVNCQTSIYRASSLSNCRHTSSVEE

SEQ ID NO: 2191 - protein, 42 aa, Artificial Sequence
  chemically synthesized
SQVSPFKIPIEELEDRFFVNCQTSIYRASSLSNCRHTSSVEE

SEQ ID NO: 2192 - protein, 42 aa, Artificial Sequence
  chemically synthesized
SQVSPFKIPIEELEDRHFVNCQTSIYRASSLSNCRHTSSVEE

SEQ ID NO: 2193 - protein, 42 aa, Artificial Sequence
  chemically synthesized
SQVSPFKIPIEELEDRMFVNCQTSIYRASSLSNCRHTSSVEE

SEQ ID NO: 2194 - protein, 42 aa, Artificial Sequence; identical to SEQ ID NO: 1728
  chemically synthesized

SEQ ID NO: 2195 - protein, 42 aa, Artificial Sequence
  chemically synthesized
SQVSPFKIPIEELEDRVLVNCQTSIYRASSLSNCRHTSSVEE

SEQ ID NO: 2196 - protein, 42 aa, Artificial Sequence
  chemically synthesized
SQVSPFKIPIEELEDRVVVNCQTSIYRASSLSNCRHTSSVEE

SEQ ID NO: 2197 - protein, 42 aa, Artificial Sequence
  chemically synthesized
SQVSPFKIPIEELEDRVHVNCQTSIYRASSLSNCRHTSSVEE

SEQ ID NO: 2198 - protein, 42 aa, Artificial Sequence
  chemically synthesized
SQVSPFKIPIEELEDRVMVNCQTSIYRASSLSNCRHTSSVEE

SEQ ID NO: 2199 - protein, 42 aa, Artificial Sequence; identical to SEQ ID NO: 1845
  chemically synthesized

SEQ ID NO: 2200 - protein, 42 aa, Artificial Sequence
  chemically synthesized
SQVSPFKIPIEELEDRVFLNCQTSIYRASSLSNCRHTSSVEE

SEQ ID NO: 2201 - protein, 42 aa, Artificial Sequence
  chemically synthesized
SQVSPFKIPIEELEDRVFFNCQTSIYRASSLSNCRHTSSVEE

SEQ ID NO: 2202 - protein, 42 aa, Artificial Sequence
  chemically synthesized
SQVSPFKIPIEELEDRVFHNCQTSIYRASSLSNCRHTSSVEE

SEQ ID NO: 2203 - protein, 42 aa, Artificial Sequence
  chemically synthesized
SQVSPFKIPIEELEDRVFMNCQTSIYRASSLSNCRHTSSVEE

SEQ ID NO: 2204 - protein, 42 aa, Artificial Sequence; identical to SEQ ID NO: 1966
  chemically synthesized

SEQ ID NO: 2205 - protein, 42 aa, Artificial Sequence
  chemically synthesized
SQVSPFKIPIEELEDRVFVNSQTSIYRASSLSNCRHTSSVEE

SEQ ID NO: 2206 - protein, 42 aa, Artificial Sequence
  chemically synthesized
SQVSPFKIPIEELEDRVFVNGQTSIYRASSLSNCRHTSSVEE

SEQ ID NO: 2207 - protein, 42 aa, Artificial Sequence
  chemically synthesized
SQVSPFKIPIEELEDRVFVNAQTSIYRASSLSNCRHTSSVEE

SEQ ID NO: 2208 - protein, 42 aa, Artificial Sequence
  chemically synthesized
SQVSPFKIPIEELEDRVFVNCQSSIYRASSLSNCRHTSSVEE

SEQ ID NO: 2209 - protein, 42 aa, Artificial Sequence
  chemically synthesized
SQVSPFKIPIEELEDRVFVNCQYSIYRASSLSNCRHTSSVEE

SEQ ID NO: 2210 - protein, 42 aa, Artificial Sequence
  chemically synthesized
SQVSPFKIPIEELEDRVFVNCQTTIYRASSLSNCRHTSSVEE

SEQ ID NO: 2211 - protein, 42 aa, Artificial Sequence
  chemically synthesized
SQVSPFKIPIEELEDRVFVNCQTYIYRASSLSNCRHTSSVEE

SEQ ID NO: 2212 - protein, 42 aa, Artificial Sequence
  chemically synthesized
SQVSPFKIPIEELEDRVFVNCQTSVYRASSLSNCRHTSSVEE

SEQ ID NO: 2213 - protein, 42 aa, Artificial Sequence
  chemically synthesized
SQVSPFKIPIEELEDRVFVNCQTSLYRASSLSNCRHTSSVEE

SEQ ID NO: 2214 - protein, 42 aa, Artificial Sequence
  chemically synthesized
SQVSPFKIPIEELEDRVFVNCQTSHYRASSLSNCRHTSSVEE

SEQ ID NO: 2215 - protein, 42 aa, Artificial Sequence
  chemically synthesized
SQVSPFKIPIEELEDRVFVNCQTSFYRASSLSNCRHTSSVEE

SEQ ID NO: 2216 - protein, 42 aa, Artificial Sequence
  chemically synthesized
SQVSPFKIPIEELEDRVFVNCQTSMYRASSLSNCRHTSSVEE

SEQ ID NO: 2217 - protein, 42 aa, Artificial Sequence
  chemically synthesized
SQVSPFKIPIEELEDRVFVNCQTSIWRASSLSNCRHTSSVEE

SEQ ID NO: 2218 - protein, 42 aa, Artificial Sequence
  chemically synthesized
SQVSPFKIPIEELEDRVFVNCQTSIFRASSLSNCRHTSSVEE

SEQ ID NO: 2219 - protein, 42 aa, Artificial Sequence
  chemically synthesized
SQVSPFKIPIEELEDRVFVNCQTSISRASSLSNCRHTSSVEE

SEQ ID NO: 2220 - protein, 42 aa, Artificial Sequence
  chemically synthesized
SQVSPFKIPIEELEDRVFVNCQTSITRASSLSNCRHTSSVEE

SEQ ID NO: 2221 - protein, 42 aa, Artificial Sequence
  chemically synthesized
  misc_feature (27)..(27): Xaa can be a proteinogenic, non-proteinogenic or synthetic amino acid like ornithin or selenocystein
SQVSPFKIPIEELEDRVFVNCQTSIYXASSLSNCRHTSSVEE

SEQ ID NO: 2222 - protein, 42 aa, Artificial Sequence
  chemically synthesized
SQVSPFKIPIEELEDRVFVNCQTSIYHASSLSNCRHTSSVEE

SEQ ID NO: 2223 - protein, 42 aa, Artificial Sequence
  chemically synthesized
SQVSPFKIPIEELEDRVFVNCQTSIYKASSLSNCRHTSSVEE

SEQ ID NO: 2224 - protein, 42 aa, Artificial Sequence
  chemically synthesized
SQVSPFKIPIEELEDRVFVNCQTSIYRGSSLSNCRHTSSVEE

SEQ ID NO: 2225 - protein, 42 aa, Artificial Sequence
  chemically synthesized
SQVSPFKIPIEELEDRVFVNCQTSIYRATSLSNCRHTSSVEE

SEQ ID NO: 2226 - protein, 42 aa, Artificial Sequence
  chemically synthesized
SQVSPFKIPIEELEDRVFVNCQTSIYRAYSLSNCRHTSSVEE

SEQ ID NO: 2227 - protein, 42 aa, Artificial Sequence
  chemically synthesized
SQVSPFKIPIEELEDRVFVNCQTSIYRASTLSNCRHTSSVEE

SEQ ID NO: 2228 - protein, 42 aa, Artificial Sequence
  chemically synthesized
SQVSPFKIPIEELEDRVFVNCQTSIYRASYLSNCRHTSSVEE

SEQ ID NO: 2229 - protein, 42 aa, Artificial Sequence
  chemically synthesized
SQVSPFKIPIEELEDRVFVNCQTSIYRASSISNCRHTSSVEE

SEQ ID NO: 2230 - protein, 42 aa, Artificial Sequence
  chemically synthesized
SQVSPFKIPIEELEDRVFVNCQTSIYRASSVSNCRHTSSVEE

SEQ ID NO: 2231 - protein, 42 aa, Artificial Sequence
  chemically synthesized
SQVSPFKIPIEELEDRVFVNCQTSIYRASSFSNCRHTSSVEE

SEQ ID NO: 2232 - protein, 42 aa, Artificial Sequence
  chemically synthesized
SQVSPFKIPIEELEDRVFVNCQTSIYRASSMSNCRHTSSVEE

SEQ ID NO: 2233 - protein, 42 aa, Artificial Sequence
  chemically synthesized
SQVSPFKIPIEELEDRVFVNCQTSIYRASSHSNCRHTSSVEE

SEQ ID NO: 2234 - protein, 42 aa, Artificial Sequence
  chemically synthesized
SQVSPFKIPIEELEDRVFVNCQTSIYRASSLTNCRHTSSVEE

SEQ ID NO: 2235 - protein, 42 aa, Artificial Sequence
  chemically synthesized
SQVSPFKIPIEELEDRVFVNCQTSIYRASSLYNCRHTSSVEE

SEQ ID NO: 2236 - protein, 42 aa, Artificial Sequence
  chemically synthesized
SQVSPFKIPIEELEDRVFVNCQTSIYRASSLSQCRHTSSVEE

SEQ ID NO: 2237 - protein, 42 aa, Artificial Sequence
  chemically synthesized
SQVSPFKIPIEELEDRVFVNCQTSIYRASSLSNSRHTSSVEE

SEQ ID NO: 2238 - protein, 42 aa, Artificial Sequence
  chemically synthesized
SQVSPFKIPIEELEDRVFVNCQTSIYRASSLSNGRHTSSVEE

SEQ ID NO: 2239 - protein, 42 aa, Artificial Sequence
  chemically synthesized
SQVSPFKIPIEELEDRVFVNCQTSIYRASSLSNARHTSSVEE

SEQ ID NO: 2240 - protein, 42 aa, Artificial Sequence
  chemically synthesized
  misc_feature (35)..(35): Xaa can be a proteinogenic, non-proteinogenic or synthetic amino acid like ornithin or selenocystein
SQVSPFKIPIEELEDRVFVNCQTSIYRASSLSNCXHTSSVEE

SEQ ID NO: 2241 - protein, 42 aa, Artificial Sequence
  chemically synthesized
SQVSPFKIPIEELEDRVFVNCQTSIYRASSLSNCHHTSSVEE

SEQ ID NO: 2242 - protein, 42 aa, Artificial Sequence
  chemically synthesized
SQVSPFKIPIEELEDRVFVNCQTSIYRASSLSNCKHTSSVEE

SEQ ID NO: 2243 - protein, 42 aa, Artificial Sequence
  chemically synthesized
SQVSPFKIPIEELEDRVFVNCQTSIYRASSLSNCRGTSSVEE

SEQ ID NO: 2244 - protein, 42 aa, Artificial Sequence
  chemically synthesized
SQVSPFKIPIEELEDRVFVNCQTSIYRASSLSNCRATSSVEE

SEQ ID NO: 2245 - protein, 42 aa, Artificial Sequence
  chemically synthesized
SQVSPFKIPIEELEDRVFVNCQTSIYRASSLSNCRITSSVEE

SEQ ID NO: 2246 - protein, 42 aa, Artificial Sequence
  chemically synthesized
SQVSPFKIPIEELEDRVFVNCQTSIYRASSLSNCRLTSSVEE

SEQ ID NO: 2247 - protein, 42 aa, Artificial Sequence
  chemically synthesized
SQVSPFKIPIEELEDRVFVNCQTSIYRASSLSNCRMTSSVEE

SEQ ID NO: 2248 - protein, 42 aa, Artificial Sequence
  chemically synthesized
SQVSPFKIPIEELEDRVFVNCQTSIYRASSLSNCRVTSSVEE

SEQ ID NO: 2249 - protein, 42 aa, Artificial Sequence
  chemically synthesized
SQVSPFKIPIEELEDRVFVNCQTSIYRASSLSNCRHSSSVEE

SEQ ID NO: 2250 - protein, 42 aa, Artificial Sequence
  chemically synthesized
SQVSPFKIPIEELEDRVFVNCQTSIYRASSLSNCRHYSSVEE

SEQ ID NO: 2251 - protein, 42 aa, Artificial Sequence
  chemically synthesized
SQVSPFKIPIEELEDRVFVNCQTSIYRASSLSNCRHTTSVEE

SEQ ID NO: 2252 - protein, 42 aa, Artificial Sequence
  chemically synthesized
SQVSPFKIPIEELEDRVFVNCQTSIYRASSLSNCRHTYSVEE

SEQ ID NO: 2253 - protein, 42 aa, Artificial Sequence
  chemically synthesized
SQVSPFKIPIEELEDRVFVNCQTSIYRASSLSNCRHTSTVEE

SEQ ID NO: 2254 - protein, 42 aa, Artificial Sequence
  chemically synthesized
SQVSPFKIPIEELEDRVFVNCQTSIYRASSLSNCRHTSYVEE

SEQ ID NO: 2255 - protein, 42 aa, Artificial Sequence
  chemically synthesized
SQVSPFKIPIEELEDRVFVNCQTSIYRASSLSNCRHTSSIEE

SEQ ID NO: 2256 - protein, 42 aa, Artificial Sequence
  chemically synthesized
SQVSPFKIPIEELEDRVFVNCQTSIYRASSLSNCRHTSSLEE

SEQ ID NO: 2257 - protein, 42 aa, Artificial Sequence
  chemically synthesized
SQVSPFKIPIEELEDRVFVNCQTSIYRASSLSNCRHTSSFEE

SEQ ID NO: 2258 - protein, 42 aa, Artificial Sequence
  chemically synthesized
SQVSPFKIPIEELEDRVFVNCQTSIYRASSLSNCRHTSSHEE

SEQ ID NO: 2259 - protein, 42 aa, Artificial Sequence
  chemically synthesized
SQVSPFKIPIEELEDRVFVNCQTSIYRASSLSNCRHTSSMEE

SEQ ID NO: 2260 - protein, 42 aa, Artificial Sequence
  chemically synthesized
SQVSPFKIPIEELEDRVFVNCQTSIYRASSLSNCRHTSSVDE

SEQ ID NO: 2261 - protein, 42 aa, Artificial Sequence
  chemically synthesized
  misc_feature (41)..(41): Xaa can be a proteinogenic, non-proteinogenic or synthetic amino acid like ornithin or selenocystein
SQVSPFKIPIEELEDRVFVNCQTSIYRASSLSNCRHTSSVXE

SEQ ID NO: 2262 - protein, 42 aa, Artificial Sequence
  chemically synthesized
SQVSPFKIPIEELEDRVFVNCQTSIYRASSLSNCRHTSSVED

SEQ ID NO: 2263 - protein, 42 aa, Artificial Sequence
  chemically synthesized
  misc_feature (42)..(42): Xaa can be a proteinogenic, non-proteinogenic or synthetic amino acid like ornithin or selenocystein
SQVSPFKIPIEELEDRVFVNCQTSIYRASSLSNCRHTSSVEX

SEQ ID NO: 2264 - protein, 42 aa, Artificial Sequence
  chemically synthesized
SQVSAFKIPIEELEDRVFVNCQTSIYRASSLSNCRHTSSVEE

SEQ ID NO: 2265 - protein, 42 aa, Artificial Sequence
  chemically synthesized
SQVSGFKIPIEELEDRVFVNCQTSIYRASSLSNCRHTSSVEE

SEQ ID NO: 2266 - protein, 42 aa, Artificial Sequence
  chemically synthesized
SQVSPFKIAIEELEDRVFVNCQTSIYRASSLSNCRHTSSVEE

SEQ ID NO: 2267 - protein, 42 aa, Artificial Sequence
  chemically synthesized
SQVSPFKIGIEELEDRVFVNCQTSIYRASSLSNCRHTSSVEE

SEQ ID NO: 2268 - protein, 42 aa, Artificial Sequence; identical to SEQ ID NO: 66
  chemically synthesized

SEQ ID NO: 2269 - protein, 42 aa, Artificial Sequence; identical to SEQ ID NO: 185
  chemically synthesized

SEQ ID NO: 2270 - protein, 42 aa, Artificial Sequence
  chemically synthesized
YQVSPFKIPIEELEDRVFVNCNSSIYRASSLSNCRHTSSVEE

SEQ ID NO: 2271 - protein, 42 aa, Artificial Sequence; identical to SEQ ID NO: 305
  chemically synthesized

SEQ ID NO: 2272 - protein, 42 aa, Artificial Sequence; identical to SEQ ID NO: 423
  chemically synthesized

SEQ ID NO: 2273 - protein, 42 aa, Artificial Sequence
  chemically synthesized
SQISPFKIPIEELEDRVFVNCNSSIYRASSLSNCRHTSSVEE

SEQ ID NO: 2274 - protein, 42 aa, Artificial Sequence
  chemically synthesized
SQPSPFKIPIEELEDRVFVNCNSSIYRASSLSNCRHTSSVEE

SEQ ID NO: 2275 - protein, 42 aa, Artificial Sequence
  chemically synthesized
SQFSPFKIPIEELEDRVFVNCNSSIYRASSLSNCRHTSSVEE

SEQ ID NO: 2276 - protein, 42 aa, Artificial Sequence; identical to SEQ ID NO: 542
  chemically synthesized

SEQ ID NO: 2277 - protein, 42 aa, Artificial Sequence
  chemically synthesized
SQVYPFKIPIEELEDRVFVNCNSSIYRASSLSNCRHTSSVEE

SEQ ID NO: 2278 - protein, 42 aa, Artificial Sequence
  chemically synthesized
SQVSPWKIPIEELEDRVFVNCNSSIYRASSLSNCRHTSSVEE

SEQ ID NO: 2279 - protein, 42 aa, Artificial Sequence
  chemically synthesized
SQVSPYKIPIEELEDRVFVNCNSSIYRASSLSNCRHTSSVEE

SEQ ID NO: 2280 - protein, 42 aa, Artificial Sequence
  chemically synthesized
SQVSPHKIPIEELEDRVFVNCNSSIYRASSLSNCRHTSSVEE

SEQ ID NO: 2281 - protein, 42 aa, Artificial Sequence
  chemically synthesized
SQVSPFRIPIEELEDRVFVNCNSSIYRASSLSNCRHTSSVEE

SEQ ID NO: 2282 - protein, 42 aa, Artificial Sequence
  chemically synthesized
SQVSPFHIPIEELEDRVFVNCNSSIYRASSLSNCRHTSSVEE

SEQ ID NO: 2283 - protein, 42 aa, Artificial Sequence
  chemically synthesized
  misc_feature (7)..(7): Xaa can be a proteinogenic, non-proteinogenic or synthetic amino acid like ornithin or selenocystein
SQVSPFXIPIEELEDRVFVNCNSSIYRASSLSNCRHTSSVEE

SEQ ID NO: 2284 - protein, 42 aa, Artificial Sequence; identical to SEQ ID NO: 781
  chemically synthesized

SEQ ID NO: 2285 - protein, 42 aa, Artificial Sequence
  chemically synthesized
SQVSPFKHPIEELEDRVFVNCNSSIYRASSLSNCRHTSSVEE

SEQ ID NO: 2286 - protein, 42 aa, Artificial Sequence
  chemically synthesized
SQVSPFKVPIEELEDRVFVNCNSSIYRASSLSNCRHTSSVEE

SEQ ID NO: 2287 - protein, 42 aa, Artificial Sequence
  chemically synthesized
SQVSPFKFPIEELEDRVFVNCNSSIYRASSLSNCRHTSSVEE

SEQ ID NO: 2288 - protein, 42 aa, Artificial Sequence
  chemically synthesized
SQVSPFKMPIEELEDRVFVNCNSSIYRASSLSNCRHTSSVEE

SEQ ID NO: 2289 - protein, 42 aa, Artificial Sequence; identical to SEQ ID NO: 899
  chemically synthesized

SEQ ID NO: 2290 - protein, 42 aa, Artificial Sequence
  chemically synthesized
SQVSPFKIPHEELEDRVFVNCNSSIYRASSLSNCRHTSSVEE

SEQ ID NO: 2291 - protein, 42 aa, Artificial Sequence
  chemically synthesized
SQVSPFKIPVEELEDRVFVNCNSSIYRASSLSNCRHTSSVEE

SEQ ID NO: 2292 - protein, 42 aa, Artificial Sequence
  chemically synthesized
SQVSPFKIPFEELEDRVFVNCNSSIYRASSLSNCRHTSSVEE

SEQ ID NO: 2293 - protein, 42 aa, Artificial Sequence
  chemically synthesized
SQVSPFKIPMEELEDRVFVNCNSSIYRASSLSNCRHTSSVEE

SEQ ID NO: 2294 - protein, 42 aa, Artificial Sequence; identical to SEQ ID NO: 1019
  chemically synthesized

SEQ ID NO: 2295 - protein, 42 aa, Artificial Sequence
  chemically synthesized
  misc_feature (11)..(11): Xaa can be a proteinogenic, non-proteinogenic or synthetic amino acid like ornithin or selenocystein
SQVSPFKIPIXELEDRVFVNCNSSIYRASSLSNCRHTSSVEE

SEQ ID NO: 2296 - protein, 42 aa, Artificial Sequence; identical to SEQ ID NO: 1139
  chemically synthesized

SEQ ID NO: 2297 - protein, 42 aa, Artificial Sequence
  chemically synthesized
  misc_feature (12)..(12): Xaa can be a proteinogenic, non-proteinogenic or synthetic amino acid like ornithin or selenocystein
SQVSPFKIPIEXLEDRVFVNCNSSIYRASSLSNCRHTSSVEE

SEQ ID NO: 2298 - protein, 42 aa, Artificial Sequence
  chemically synthesized
SQVSPFKIPIEEVEDRVFVNCNSSIYRASSLSNCRHTSSVEE

SEQ ID NO: 2299 - protein, 42 aa, Artificial Sequence; identical to SEQ ID NO: 1256
  chemically synthesized

SEQ ID NO: 2300 - protein, 42 aa, Artificial Sequence
  chemically synthesized
SQVSPFKIPIEEFEDRVFVNCNSSIYRASSLSNCRHTSSVEE

SEQ ID NO: 2301 - protein, 42 aa, Artificial Sequence
  chemically synthesized
SQVSPFKIPIEEHEDRVFVNCNSSIYRASSLSNCRHTSSVEE

SEQ ID NO: 2302 - protein, 42 aa, Artificial Sequence
  chemically synthesized
SQVSPFKIPIEEMEDRVFVNCNSSIYRASSLSNCRHTSSVEE

SEQ ID NO: 2303 - protein, 42 aa, Artificial Sequence; identical to SEQ ID NO: 1376
  chemically synthesized

SEQ ID NO: 2304 - protein, 42 aa, Artificial Sequence
  chemically synthesized
  misc_feature (14)..(14): Xaa can be a proteinogenic, non-proteinogenic or synthetic amino acid like ornithin or selenocystein
SQVSPFKIPIEELXDRVFVNCNSSIYRASSLSNCRHTSSVEE

SEQ ID NO: 2305 - protein, 42 aa, Artificial Sequence
  chemically synthesized
  misc_feature (15)..(15): Xaa can be a proteinogenic, non-proteinogenic or synthetic amino acid like ornithin or selenocystein
SQVSPFKIPIEELEXRVFVNCNSSIYRASSLSNCRHTSSVEE

SEQ ID NO: 2306 - protein, 42 aa, Artificial Sequence
  chemically synthesized
SQVSPFKIPIEELEERVFVNCNSSIYRASSLSNCRHTSSVEE

SEQ ID NO: 2307 - protein, 42 aa, Artificial Sequence; identical to SEQ ID NO: 1495
  chemically synthesized

SEQ ID NO: 2308 - protein, 42 aa, Artificial Sequence
  chemically synthesized
SQVSPFKIPIEELEDHVFVNCNSSIYRASSLSNCRHTSSVEE

SEQ ID NO: 2309 - protein, 42 aa, Artificial Sequence
  chemically synthesized
  misc_feature (16)..(16): Xaa can be a proteinogenic, non-proteinogenic or synthetic amino acid like ornithin or selenocystein
SQVSPFKIPIEELEDXVFVNCNSSIYRASSLSNCRHTSSVEE

SEQ ID NO: 2310 - protein, 42 aa, Artificial Sequence; identical to SEQ ID NO: 1612
  chemically synthesized

SEQ ID NO: 2311 - protein, 42 aa, Artificial Sequence
  chemically synthesized
SQVSPFKIPIEELEDRLFVNCNSSIYRASSLSNCRHTSSVEE

SEQ ID NO: 2312 - protein, 42 aa, Artificial Sequence
  chemically synthesized
SQVSPFKIPIEELEDRFFVNCNSSIYRASSLSNCRHTSSVEE

SEQ ID NO: 2313 - protein, 42 aa, Artificial Sequence
  chemically synthesized
SQVSPFKIPIEELEDRHFVNCNSSIYRASSLSNCRHTSSVEE

SEQ ID NO: 2314 - protein, 42 aa, Artificial Sequence
  chemically synthesized
SQVSPFKIPIEELEDRMFVNCNSSIYRASSLSNCRHTSSVEE

SEQ ID NO: 2315 - protein, 42 aa, Artificial Sequence; identical to SEQ ID NO: 1729
  chemically synthesized

SEQ ID NO: 2316 - protein, 42 aa, Artificial Sequence
  chemically synthesized
SQVSPFKIPIEELEDRVLVNCNSSIYRASSLSNCRHTSSVEE

SEQ ID NO: 2317 - protein, 42 aa, Artificial Sequence
  chemically synthesized
SQVSPFKIPIEELEDRVVVNCNSSIYRASSLSNCRHTSSVEE

SEQ ID NO: 2318 - protein, 42 aa, Artificial Sequence
  chemically synthesized
SQVSPFKIPIEELEDRVHVNCNSSIYRASSLSNCRHTSSVEE

SEQ ID NO: 2319 - protein, 42 aa, Artificial Sequence
  chemically synthesized
SQVSPFKIPIEELEDRVMVNCNSSIYRASSLSNCRHTSSVEE

SEQ ID NO: 2320 - protein, 42 aa, Artificial Sequence; identical to SEQ ID NO: 1846
  chemically synthesized

SEQ ID NO: 2321 - protein, 42 aa, Artificial Sequence
  chemically synthesized
SQVSPFKIPIEELEDRVFLNCNSSIYRASSLSNCRHTSSVEE

SEQ ID NO: 2322 - protein, 42 aa, Artificial Sequence
  chemically synthesized
SQVSPFKIPIEELEDRVFFNCNSSIYRASSLSNCRHTSSVEE

SEQ ID NO: 2323 - protein, 42 aa, Artificial Sequence
  chemically synthesized
SQVSPFKIPIEELEDRVFHNCNSSIYRASSLSNCRHTSSVEE

SEQ ID NO: 2324 - protein, 42 aa, Artificial Sequence
  chemically synthesized
SQVSPFKIPIEELEDRVFMNCNSSIYRASSLSNCRHTSSVEE

SEQ ID NO: 2325 - protein, 42 aa, Artificial Sequence; identical to SEQ ID NO: 1967
  chemically synthesized

SEQ ID NO: 2326 - protein, 42 aa, Artificial Sequence
  chemically synthesized
SQVSPFKIPIEELEDRVFVNSNSSIYRASSLSNCRHTSSVEE

SEQ ID NO: 2327 - protein, 42 aa, Artificial Sequence
  chemically synthesized
SQVSPFKIPIEELEDRVFVNGNSSIYRASSLSNCRHTSSVEE

SEQ ID NO: 2328 - protein, 42 aa, Artificial Sequence
  chemically synthesized
SQVSPFKIPIEELEDRVFVNANSSIYRASSLSNCRHTSSVEE

SEQ ID NO: 2329 - protein, 42 aa, Artificial Sequence; identical to SEQ ID NO: 2208
  chemically synthesized

SEQ ID NO: 2330 - protein, 42 aa, Artificial Sequence
  chemically synthesized
SQVSPFKIPIEELEDRVFVNCNSTIYRASSLSNCRHTSSVEE

SEQ ID NO: 2331 - protein, 42 aa, Artificial Sequence
  chemically synthesized
SQVSPFKIPIEELEDRVFVNCNSYIYRASSLSNCRHTSSVEE

SEQ ID NO: 2332 - protein, 42 aa, Artificial Sequence
  chemically synthesized
SQVSPFKIPIEELEDRVFVNCNSSVYRASSLSNCRHTSSVEE

SEQ ID NO: 2333 - protein, 42 aa, Artificial Sequence
  chemically synthesized
SQVSPFKIPIEELEDRVFVNCNSSLYRASSLSNCRHTSSVEE

SEQ ID NO: 2334 - protein, 42 aa, Artificial Sequence
  chemically synthesized
SQVSPFKIPIEELEDRVFVNCNSSHYRASSLSNCRHTSSVEE

SEQ ID NO: 2335 - protein, 42 aa, Artificial Sequence
  chemically synthesized
SQVSPFKIPIEELEDRVFVNCNSSFYRASSLSNCRHTSSVEE

SEQ ID NO: 2336 - protein, 42 aa, Artificial Sequence
  chemically synthesized
SQVSPFKIPIEELEDRVFVNCNSSMYRASSLSNCRHTSSVEE

SEQ ID NO: 2337 - protein, 42 aa, Artificial Sequence
  chemically synthesized
SQVSPFKIPIEELEDRVFVNCNSSIWRASSLSNCRHTSSVEE

SEQ ID NO: 2338 - protein, 42 aa, Artificial Sequence
  chemically synthesized
SQVSPFKIPIEELEDRVFVNCNSSIFRASSLSNCRHTSSVEE

SEQ ID NO: 2339 - protein, 42 aa, Artificial Sequence
  chemically synthesized
SQVSPFKIPIEELEDRVFVNCNSSISRASSLSNCRHTSSVEE

SEQ ID NO: 2340 - protein, 42 aa, Artificial Sequence
  chemically synthesized
SQVSPFKIPIEELEDRVFVNCNSSITRASSLSNCRHTSSVEE

SEQ ID NO: 2341 - protein, 42 aa, Artificial Sequence
  chemically synthesized
  misc_feature (27)..(27): Xaa can be a proteinogenic, non-proteinogenic or synthetic amino acid like ornithin or selenocystein
SQVSPFKIPIEELEDRVFVNCNSSIYXASSLSNCRHTSSVEE

SEQ ID NO: 2342 - protein, 42 aa, Artificial Sequence
  chemically synthesized
SQVSPFKIPIEELEDRVFVNCNSSIYHASSLSNCRHTSSVEE

SEQ ID NO: 2343 - protein, 42 aa, Artificial Sequence
  chemically synthesized
SQVSPFKIPIEELEDRVFVNCNSSIYKASSLSNCRHTSSVEE

SEQ ID NO: 2344 - protein, 42 aa, Artificial Sequence
  chemically synthesized
SQVSPFKIPIEELEDRVFVNCNSSIYRGSSLSNCRHTSSVEE

SEQ ID NO: 2345 - protein, 42 aa, Artificial Sequence
  chemically synthesized
SQVSPFKIPIEELEDRVFVNCNSSIYRATSLSNCRHTSSVEE

SEQ ID NO: 2346 - protein, 42 aa, Artificial Sequence
  chemically synthesized
SQVSPFKIPIEELEDRVFVNCNSSIYRAYSLSNCRHTSSVEE

SEQ ID NO: 2347 - protein, 42 aa, Artificial Sequence
  chemically synthesized
SQVSPFKIPIEELEDRVFVNCNSSIYRASTLSNCRHTSSVEE

SEQ ID NO: 2348 - protein, 42 aa, Artificial Sequence
  chemically synthesized
SQVSPFKIPIEELEDRVFVNCNSSIYRASYLSNCRHTSSVEE

SEQ ID NO: 2349 - protein, 42 aa, Artificial Sequence
  chemically synthesized
SQVSPFKIPIEELEDRVFVNCNSSIYRASSISNCRHTSSVEE

SEQ ID NO: 2350 - protein, 42 aa, Artificial Sequence
  chemically synthesized
SQVSPFKIPIEELEDRVFVNCNSSIYRASSVSNCRHTSSVEE

SEQ ID NO: 2351 - protein, 42 aa, Artificial Sequence
  chemically synthesized
SQVSPFKIPIEELEDRVFVNCNSSIYRASSFSNCRHTSSVEE

SEQ ID NO: 2352 - protein, 42 aa, Artificial Sequence
  chemically synthesized
SQVSPFKIPIEELEDRVFVNCNSSIYRASSMSNCRHTSSVEE

SEQ ID NO: 2353 - protein, 42 aa, Artificial Sequence
  chemically synthesized
SQVSPFKIPIEELEDRVFVNCNSSIYRASSHSNCRHTSSVEE

SEQ ID NO: 2354 - protein, 42 aa, Artificial Sequence
  chemically synthesized
SQVSPFKIPIEELEDRVFVNCNSSIYRASSLTNCRHTSSVEE

SEQ ID NO: 2355 - protein, 42 aa, Artificial Sequence
  chemically synthesized
SQVSPFKIPIEELEDRVFVNCNSSIYRASSLYNCRHTSSVEE

SEQ ID NO: 2356 - protein, 42 aa, Artificial Sequence
  chemically synthesized
SQVSPFKIPIEELEDRVFVNCNSSIYRASSLSQCRHTSSVEE

SEQ ID NO: 2357 - protein, 42 aa, Artificial Sequence
  chemically synthesized
SQVSPFKIPIEELEDRVFVNCNSSIYRASSLSNSRHTSSVEE

SEQ ID NO: 2358 - protein, 42 aa, Artificial Sequence
  chemically synthesized
SQVSPFKIPIEELEDRVFVNCNSSIYRASSLSNGRHTSSVEE

SEQ ID NO: 2359 - protein, 42 aa, Artificial Sequence
  chemically synthesized
SQVSPFKIPIEELEDRVFVNCNSSIYRASSLSNARHTSSVEE

SEQ ID NO: 2360 - protein, 42 aa, Artificial Sequence
  chemically synthesized
  misc_feature (35)..(35): Xaa can be a proteinogenic, non-proteinogenic or synthetic amino acid like ornithin or selenocystein
SQVSPFKIPIEELEDRVFVNCNSSIYRASSLSNCXHTSSVEE

SEQ ID NO: 2361 - protein, 42 aa, Artificial Sequence
  chemically synthesized
SQVSPFKIPIEELEDRVFVNCNSSIYRASSLSNCHHTSSVEE

SEQ ID NO: 2362 - protein, 42 aa, Artificial Sequence
  chemically synthesized
SQVSPFKIPIEELEDRVFVNCNSSIYRASSLSNCKHTSSVEE

SEQ ID NO: 2363 - protein, 42 aa, Artificial Sequence
  chemically synthesized
SQVSPFKIPIEELEDRVFVNCNSSIYRASSLSNCRGTSSVEE

SEQ ID NO: 2364 - protein, 42 aa, Artificial Sequence
  chemically synthesized
SQVSPFKIPIEELEDRVFVNCNSSIYRASSLSNCRATSSVEE

SEQ ID NO: 2365 - protein, 42 aa, Artificial Sequence
  chemically synthesized
SQVSPFKIPIEELEDRVFVNCNSSIYRASSLSNCRITSSVEE

SEQ ID NO: 2366 - protein, 42 aa, Artificial Sequence
  chemically synthesized
SQVSPFKIPIEELEDRVFVNCNSSIYRASSLSNCRLTSSVEE

SEQ ID NO: 2367 - protein, 42 aa, Artificial Sequence
  chemically synthesized
SQVSPFKIPIEELEDRVFVNCNSSIYRASSLSNCRMTSSVEE

SEQ ID NO: 2368 - protein, 42 aa, Artificial Sequence
  chemically synthesized
SQVSPFKIPIEELEDRVFVNCNSSIYRASSLSNCRVTSSVEE

SEQ ID NO: 2369 - protein, 42 aa, Artificial Sequence
  chemically synthesized
SQVSPFKIPIEELEDRVFVNCNSSIYRASSLSNCRHSSSVEE

SEQ ID NO: 2370 - protein, 42 aa, Artificial Sequence
  chemically synthesized
SQVSPFKIPIEELEDRVFVNCNSSIYRASSLSNCRHYSSVEE

SEQ ID NO: 2371 - protein, 42 aa, Artificial Sequence
  chemically synthesized
SQVSPFKIPIEELEDRVFVNCNSSIYRASSLSNCRHTTSVEE

SEQ ID NO: 2372 - protein, 42 aa, Artificial Sequence
  chemically synthesized
SQVSPFKIPIEELEDRVFVNCNSSIYRASSLSNCRHTYSVEE

SEQ ID NO: 2373 - protein, 42 aa, Artificial Sequence
  chemically synthesized
SQVSPFKIPIEELEDRVFVNCNSSIYRASSLSNCRHTSTVEE

SEQ ID NO: 2374 - protein, 42 aa, Artificial Sequence
  chemically synthesized
SQVSPFKIPIEELEDRVFVNCNSSIYRASSLSNCRHTSYVEE

SEQ ID NO: 2375 - protein, 42 aa, Artificial Sequence
  chemically synthesized
SQVSPFKIPIEELEDRVFVNCNSSIYRASSLSNCRHTSSIEE

SEQ ID NO: 2376 - protein, 42 aa, Artificial Sequence
  chemically synthesized
SQVSPFKIPIEELEDRVFVNCNSSIYRASSLSNCRHTSSLEE

SEQ ID NO: 2377 - protein, 42 aa, Artificial Sequence
  chemically synthesized
SQVSPFKIPIEELEDRVFVNCNSSIYRASSLSNCRHTSSFEE

SEQ ID NO: 2378 - protein, 42 aa, Artificial Sequence
  chemically synthesized
SQVSPFKIPIEELEDRVFVNCNSSIYRASSLSNCRHTSSHEE

SEQ ID NO: 2379 - protein, 42 aa, Artificial Sequence
  chemically synthesized
SQVSPFKIPIEELEDRVFVNCNSSIYRASSLSNCRHTSSMEE

SEQ ID NO: 2380 - protein, 42 aa, Artificial Sequence
  chemically synthesized
SQVSPFKIPIEELEDRVFVNCNSSIYRASSLSNCRHTSSVDE

SEQ ID NO: 2381 - protein, 42 aa, Artificial Sequence
  chemically synthesized
  misc_feature (41)..(41): Xaa can be a proteinogenic, non-proteinogenic or synthetic amino acid like ornithin or selenocystein
SQVSPFKIPIEELEDRVFVNCNSSIYRASSLSNCRHTSSVXE

SEQ ID NO: 2382 - protein, 42 aa, Artificial Sequence
  chemically synthesized
SQVSPFKIPIEELEDRVFVNCNSSIYRASSLSNCRHTSSVED

SEQ ID NO: 2383 - protein, 42 aa, Artificial Sequence
  chemically synthesized
  misc_feature (42)..(42): Xaa can be a proteinogenic, non-proteinogenic or synthetic amino acid like ornithin or selenocystein
SQVSPFKIPIEELEDRVFVNCNSSIYRASSLSNCRHTSSVEX

SEQ ID NO: 2384 - protein, 42 aa, Artificial Sequence
  chemically synthesized
SQVSAFKIPIEELEDRVFVNCNSSIYRASSLSNCRHTSSVEE

SEQ ID NO: 2385 - protein, 42 aa, Artificial Sequence
  chemically synthesized
SQVSGFKIPIEELEDRVFVNCNSSIYRASSLSNCRHTSSVEE

SEQ ID NO: 2386 - protein, 42 aa, Artificial Sequence
  chemically synthesized
SQVSPFKIAIEELEDRVFVNCNSSIYRASSLSNCRHTSSVEE

SEQ ID NO: 2387 - protein, 42 aa, Artificial Sequence
  chemically synthesized
SQVSPFKIGIEELEDRVFVNCNSSIYRASSLSNCRHTSSVEE

SEQ ID NO: 2388 - protein, 42 aa, Artificial Sequence; identical to SEQ ID NO: 68
  chemically synthesized

SEQ ID NO: 2389 - protein, 42 aa, Artificial Sequence; identical to SEQ ID NO: 187
  chemically synthesized

SEQ ID NO: 2390 - protein, 42 aa, Artificial Sequence
  chemically synthesized
YQVSPFKIPIEELEDRVFVNCNTTIYRASSLSNCRHTSSVEE

SEQ ID NO: 2391 - protein, 42 aa, Artificial Sequence; identical to SEQ ID NO: 307
  chemically synthesized

SEQ ID NO: 2392 - protein, 42 aa, Artificial Sequence; identical to SEQ ID NO: 425
  chemically synthesized

SEQ ID NO: 2393 - protein, 42 aa, Artificial Sequence
  chemically synthesized
SQISPFKIPIEELEDRVFVNCNTTIYRASSLSNCRHTSSVEE

SEQ ID NO: 2394 - protein, 42 aa, Artificial Sequence
  chemically synthesized
SQPSPFKIPIEELEDRVFVNCNTTIYRASSLSNCRHTSSVEE

SEQ ID NO: 2395 - protein, 42 aa, Artificial Sequence
  chemically synthesized
SQFSPFKIPIEELEDRVFVNCNTTIYRASSLSNCRHTSSVEE

SEQ ID NO: 2396 - protein, 42 aa, Artificial Sequence; identical to SEQ ID NO: 544
  chemically synthesized

SEQ ID NO: 2397 - protein, 42 aa, Artificial Sequence
  chemically synthesized
SQVYPFKIPIEELEDRVFVNCNTTIYRASSLSNCRHTSSVEE

SEQ ID NO: 2398 - protein, 42 aa, Artificial Sequence
  chemically synthesized
SQVSPWKIPIEELEDRVFVNCNTTIYRASSLSNCRHTSSVEE

SEQ ID NO: 2399 - protein, 42 aa, Artificial Sequence
  chemically synthesized
SQVSPYKIPIEELEDRVFVNCNTTIYRASSLSNCRHTSSVEE

SEQ ID NO: 2400 - protein, 42 aa, Artificial Sequence
  chemically synthesized
SQVSPHKIPIEELEDRVFVNCNTTIYRASSLSNCRHTSSVEE

SEQ ID NO: 2401 - protein, 42 aa, Artificial Sequence
  chemically synthesized
SQVSPFRIPIEELEDRVFVNCNTTIYRASSLSNCRHTSSVEE

SEQ ID NO: 2402 - protein, 42 aa, Artificial Sequence
  chemically synthesized
SQVSPFHIPIEELEDRVFVNCNTTIYRASSLSNCRHTSSVEE

SEQ ID NO: 2403 - protein, 42 aa, Artificial Sequence
  chemically synthesized
  misc_feature (7)..(7): Xaa can be a proteinogenic, non-proteinogenic or synthetic amino acid like ornithin or selenocystein
SQVSPFXIPIEELEDRVFVNCNTTIYRASSLSNCRHTSSVEE

SEQ ID NO: 2404 - protein, 42 aa, Artificial Sequence; identical to SEQ ID NO: 783
  chemically synthesized

SEQ ID NO: 2405 - protein, 42 aa, Artificial Sequence
  chemically synthesized
SQVSPFKHPIEELEDRVFVNCNTTIYRASSLSNCRHTSSVEE

SEQ ID NO: 2406 - protein, 42 aa, Artificial Sequence
  chemically synthesized
SQVSPFKVPIEELEDRVFVNCNTTIYRASSLSNCRHTSSVEE

SEQ ID NO: 2407 - protein, 42 aa, Artificial Sequence
  chemically synthesized
SQVSPFKFPIEELEDRVFVNCNTTIYRASSLSNCRHTSSVEE

SEQ ID NO: 2408 - protein, 42 aa, Artificial Sequence
  chemically synthesized
SQVSPFKMPIEELEDRVFVNCNTTIYRASSLSNCRHTSSVEE

SEQ ID NO: 2409 - protein, 42 aa, Artificial Sequence; identical to SEQ ID NO: 901
  chemically synthesized

SEQ ID NO: 2410 - protein, 42 aa, Artificial Sequence
  chemically synthesized
SQVSPFKIPHEELEDRVFVNCNTTIYRASSLSNCRHTSSVEE

SEQ ID NO: 2411 - protein, 42 aa, Artificial Sequence
  chemically synthesized
SQVSPFKIPVEELEDRVFVNCNTTIYRASSLSNCRHTSSVEE

SEQ ID NO: 2412 - protein, 42 aa, Artificial Sequence
  chemically synthesized
SQVSPFKIPFEELEDRVFVNCNTTIYRASSLSNCRHTSSVEE

SEQ ID NO: 2413 - protein, 42 aa, Artificial Sequence
  chemically synthesized
SQVSPFKIPMEELEDRVFVNCNTTIYRASSLSNCRHTSSVEE

SEQ ID NO: 2414 - protein, 42 aa, Artificial Sequence; identical to SEQ ID NO: 1021
  chemically synthesized

SEQ ID NO: 2415 - protein, 42 aa, Artificial Sequence
  chemically synthesized
  misc_feature (11)..(11): Xaa can be a proteinogenic, non-proteinogenic or synthetic amino acid like ornithin or selenocystein
SQVSPFKIPIXELEDRVFVNCNTTIYRASSLSNCRHTSSVEE

SEQ ID NO: 2416 - protein, 42 aa, Artificial Sequence; identical to SEQ ID NO: 1141
  chemically synthesized

SEQ ID NO: 2417 - protein, 42 aa, Artificial Sequence
  chemically synthesized
  misc_feature (12)..(12): Xaa can be a proteinogenic, non-proteinogenic or synthetic amino acid like ornithin or selenocystein
SQVSPFKIPIEXLEDRVFVNCNTTIYRASSLSNCRHTSSVEE

SEQ ID NO: 2418 - protein, 42 aa, Artificial Sequence
  chemically synthesized
SQVSPFKIPIEEVEDRVFVNCNTTIYRASSLSNCRHTSSVEE

SEQ ID NO: 2419 - protein, 42 aa, Artificial Sequence; identical to SEQ ID NO: 1258
  chemically synthesized

SEQ ID NO: 2420 - protein, 42 aa, Artificial Sequence
  chemically synthesized
SQVSPFKIPIEEFEDRVFVNCNTTIYRASSLSNCRHTSSVEE

SEQ ID NO: 2421 - protein, 42 aa, Artificial Sequence
  chemically synthesized
SQVSPFKIPIEEHEDRVFVNCNTTIYRASSLSNCRHTSSVEE

SEQ ID NO: 2422 - protein, 42 aa, Artificial Sequence
  chemically synthesized
SQVSPFKIPIEEMEDRVFVNCNTTIYRASSLSNCRHTSSVEE

SEQ ID NO: 2423 - protein, 42 aa, Artificial Sequence; identical to SEQ ID NO: 1378
  chemically synthesized

SEQ ID NO: 2424 - protein, 42 aa, Artificial Sequence
  chemically synthesized
  misc_feature (14)..(14): Xaa can be a proteinogenic, non-proteinogenic or synthetic amino acid like ornithin or selenocystein
SQVSPFKIPIEELXDRVFVNCNTTIYRASSLSNCRHTSSVEE

SEQ ID NO: 2425 - protein, 42 aa, Artificial Sequence
  chemically synthesized
  misc_feature (15)..(15): Xaa can be a proteinogenic, non-proteinogenic or synthetic amino acid like ornithin or selenocystein
SQVSPFKIPIEELEXRVFVNCNTTIYRASSLSNCRHTSSVEE

SEQ ID NO: 2426 - protein, 42 aa, Artificial Sequence
  chemically synthesized
SQVSPFKIPIEELEERVFVNCNTTIYRASSLSNCRHTSSVEE

SEQ ID NO: 2427 - protein, 42 aa, Artificial Sequence; identical to SEQ ID NO: 1497
  chemically synthesized

SEQ ID NO: 2428 - protein, 42 aa, Artificial Sequence
  chemically synthesized
SQVSPFKIPIEELEDHVFVNCNTTIYRASSLSNCRHTSSVEE

SEQ ID NO: 2429 - protein, 42 aa, Artificial Sequence
  chemically synthesized
  misc_feature (16)..(16): Xaa can be a proteinogenic, non-proteinogenic or synthetic amino acid like ornithin or selenocystein
SQVSPFKIPIEELEDXVFVNCNTTIYRASSLSNCRHTSSVEE

SEQ ID NO: 2430 - protein, 42 aa, Artificial Sequence; identical to SEQ ID NO: 1614
  chemically synthesized

SEQ ID NO: 2431 - protein, 42 aa, Artificial Sequence
  chemically synthesized
SQVSPFKIPIEELEDRLFVNCNTTIYRASSLSNCRHTSSVEE

SEQ ID NO: 2432 - protein, 42 aa, Artificial Sequence
  chemically synthesized
SQVSPFKIPIEELEDRFFVNCNTTIYRASSLSNCRHTSSVEE

SEQ ID NO: 2433 - protein, 42 aa, Artificial Sequence
  chemically synthesized
SQVSPFKIPIEELEDRHFVNCNTTIYRASSLSNCRHTSSVEE

SEQ ID NO: 2434 - protein, 42 aa, Artificial Sequence
  chemically synthesized
SQVSPFKIPIEELEDRMFVNCNTTIYRASSLSNCRHTSSVEE

SEQ ID NO: 2435 - protein, 42 aa, Artificial Sequence; identical to SEQ ID NO: 1731
  chemically synthesized

SEQ ID NO: 2436 - protein, 42 aa, Artificial Sequence
  chemically synthesized
SQVSPFKIPIEELEDRVLVNCNTTIYRASSLSNCRHTSSVEE

SEQ ID NO: 2437 - protein, 42 aa, Artificial Sequence
  chemically synthesized
SQVSPFKIPIEELEDRVVVNCNTTIYRASSLSNCRHTSSVEE

SEQ ID NO: 2438 - protein, 42 aa, Artificial Sequence
  chemically synthesized
SQVSPFKIPIEELEDRVHVNCNTTIYRASSLSNCRHTSSVEE

SEQ ID NO: 2439 - protein, 42 aa, Artificial Sequence
  chemically synthesized
SQVSPFKIPIEELEDRVMVNCNTTIYRASSLSNCRHTSSVEE

SEQ ID NO: 2440 - protein, 42 aa, Artificial Sequence; identical to SEQ ID NO: 1848
  chemically synthesized

SEQ ID NO: 2441 - protein, 42 aa, Artificial Sequence
  chemically synthesized
SQVSPFKIPIEELEDRVFLNCNTTIYRASSLSNCRHTSSVEE

SEQ ID NO: 2442 - protein, 42 aa, Artificial Sequence
  chemically synthesized
SQVSPFKIPIEELEDRVFFNCNTTIYRASSLSNCRHTSSVEE

SEQ ID NO: 2443 - protein, 42 aa, Artificial Sequence
  chemically synthesized
SQVSPFKIPIEELEDRVFHNCNTTIYRASSLSNCRHTSSVEE

SEQ ID NO: 2444 - protein, 42 aa, Artificial Sequence
  chemically synthesized
SQVSPFKIPIEELEDRVFMNCNTTIYRASSLSNCRHTSSVEE

SEQ ID NO: 2445 - protein, 42 aa, Artificial Sequence; identical to SEQ ID NO: 1969
  chemically synthesized

SEQ ID NO: 2446 - protein, 42 aa, Artificial Sequence
  chemically synthesized
SQVSPFKIPIEELEDRVFVNSNTTIYRASSLSNCRHTSSVEE

SEQ ID NO: 2447 - protein, 42 aa, Artificial Sequence
  chemically synthesized
SQVSPFKIPIEELEDRVFVNGNTTIYRASSLSNCRHTSSVEE

SEQ ID NO: 2448 - protein, 42 aa, Artificial Sequence
  chemically synthesized
SQVSPFKIPIEELEDRVFVNANTTIYRASSLSNCRHTSSVEE

SEQ ID NO: 2449 - protein, 42 aa, Artificial Sequence; identical to SEQ ID NO: 2210
  chemically synthesized

SEQ ID NO: 2450 - protein, 42 aa, Artificial Sequence; identical to SEQ ID NO: 2330
  chemically synthesized

SEQ ID NO: 2451 - protein, 42 aa, Artificial Sequence
  chemically synthesized
SQVSPFKIPIEELEDRVFVNCNYTIYRASSLSNCRHTSSVEE

SEQ ID NO: 2452 - protein, 42 aa, Artificial Sequence
  chemically synthesized
SQVSPFKIPIEELEDRVFVNCNTTVYRASSLSNCRHTSSVEE

SEQ ID NO: 2453 - protein, 42 aa, Artificial Sequence
  chemically synthesized
SQVSPFKIPIEELEDRVFVNCNTTLYRASSLSNCRHTSSVEE

SEQ ID NO: 2454 - protein, 42 aa, Artificial Sequence
  chemically synthesized
SQVSPFKIPIEELEDRVFVNCNTTHYRASSLSNCRHTSSVEE

SEQ ID NO: 2455 - protein, 42 aa, Artificial Sequence
  chemically synthesized
SQVSPFKIPIEELEDRVFVNCNTTFYRASSLSNCRHTSSVEE

SEQ ID NO: 2456 - protein, 42 aa, Artificial Sequence
  chemically synthesized
SQVSPFKIPIEELEDRVFVNCNTTMYRASSLSNCRHTSSVEE

SEQ ID NO: 2457 - protein, 42 aa, Artificial Sequence
  chemically synthesized
SQVSPFKIPIEELEDRVFVNCNTTIWRASSLSNCRHTSSVEE

SEQ ID NO: 2458 - protein, 42 aa, Artificial Sequence
  chemically synthesized
SQVSPFKIPIEELEDRVFVNCNTTIFRASSLSNCRHTSSVEE

SEQ ID NO: 2459 - protein, 42 aa, Artificial Sequence
  chemically synthesized
SQVSPFKIPIEELEDRVFVNCNTTISRASSLSNCRHTSSVEE

SEQ ID NO: 2460 - protein, 42 aa, Artificial Sequence
  chemically synthesized
SQVSPFKIPIEELEDRVFVNCNTTITRASSLSNCRHTSSVEE

SEQ ID NO: 2461 - protein, 42 aa, Artificial Sequence
  chemically synthesized
  misc_feature (27)..(27): Xaa can be a proteinogenic, non-proteinogenic or synthetic amino acid like ornithin or selenocystein
SQVSPFKIPIEELEDRVFVNCNTTIYXASSLSNCRHTSSVEE

SEQ ID NO: 2462 - protein, 42 aa, Artificial Sequence
  chemically synthesized
SQVSPFKIPIEELEDRVFVNCNTTIYHASSLSNCRHTSSVEE

SEQ ID NO: 2463 - protein, 42 aa, Artificial Sequence
  chemically synthesized
SQVSPFKIPIEELEDRVFVNCNTTIYKASSLSNCRHTSSVEE

SEQ ID NO: 2464 - protein, 42 aa, Artificial Sequence
  chemically synthesized
SQVSPFKIPIEELEDRVFVNCNTTIYRGSSLSNCRHTSSVEE

SEQ ID NO: 2465 - protein, 42 aa, Artificial Sequence
  chemically synthesized
SQVSPFKIPIEELEDRVFVNCNTTIYRATSLSNCRHTSSVEE

SEQ ID NO: 2466 - protein, 42 aa, Artificial Sequence
  chemically synthesized
SQVSPFKIPIEELEDRVFVNCNTTIYRAYSLSNCRHTSSVEE

SEQ ID NO: 2467 - protein, 42 aa, Artificial Sequence
  chemically synthesized
SQVSPFKIPIEELEDRVFVNCNTTIYRASTLSNCRHTSSVEE

SEQ ID NO: 2468 - protein, 42 aa, Artificial Sequence
  chemically synthesized
SQVSPFKIPIEELEDRVFVNCNTTIYRASYLSNCRHTSSVEE

SEQ ID NO: 2469 - protein, 42 aa, Artificial Sequence
  chemically synthesized
SQVSPFKIPIEELEDRVFVNCNTTIYRASSISNCRHTSSVEE

SEQ ID NO: 2470 - protein, 42 aa, Artificial Sequence
  chemically synthesized
SQVSPFKIPIEELEDRVFVNCNTTIYRASSVSNCRHTSSVEE

SEQ ID NO: 2471 - protein, 42 aa, Artificial Sequence
  chemically synthesized
SQVSPFKIPIEELEDRVFVNCNTTIYRASSFSNCRHTSSVEE

SEQ ID NO: 2472 - protein, 42 aa, Artificial Sequence
  chemically synthesized
SQVSPFKIPIEELEDRVFVNCNTTIYRASSMSNCRHTSSVEE

SEQ ID NO: 2473 - protein, 42 aa, Artificial Sequence
  chemically synthesized
SQVSPFKIPIEELEDRVFVNCNTTIYRASSHSNCRHTSSVEE

SEQ ID NO: 2474 - protein, 42 aa, Artificial Sequence
  chemically synthesized
SQVSPFKIPIEELEDRVFVNCNTTIYRASSLTNCRHTSSVEE

SEQ ID NO: 2475 - protein, 42 aa, Artificial Sequence
  chemically synthesized
SQVSPFKIPIEELEDRVFVNCNTTIYRASSLYNCRHTSSVEE

SEQ ID NO: 2476 - protein, 42 aa, Artificial Sequence
  chemically synthesized
SQVSPFKIPIEELEDRVFVNCNTTIYRASSLSQCRHTSSVEE

SEQ ID NO: 2477 - protein, 42 aa, Artificial Sequence
  chemically synthesized
SQVSPFKIPIEELEDRVFVNCNTTIYRASSLSNSRHTSSVEE

SEQ ID NO: 2478 - protein, 42 aa, Artificial Sequence
  chemically synthesized
SQVSPFKIPIEELEDRVFVNCNTTIYRASSLSNGRHTSSVEE

SEQ ID NO: 2479 - protein, 42 aa, Artificial Sequence
  chemically synthesized
SQVSPFKIPIEELEDRVFVNCNTTIYRASSLSNARHTSSVEE

SEQ ID NO: 2480 - protein, 42 aa, Artificial Sequence
  chemically synthesized
  misc_feature (35)..(35): Xaa can be a proteinogenic, non-proteinogenic or synthetic amino acid like ornithin or selenocystein
SQVSPFKIPIEELEDRVFVNCNTTIYRASSLSNCXHTSSVEE

SEQ ID NO: 2481 - protein, 42 aa, Artificial Sequence
  chemically synthesized
SQVSPFKIPIEELEDRVFVNCNTTIYRASSLSNCHHTSSVEE

SEQ ID NO: 2482 - protein, 42 aa, Artificial Sequence
  chemically synthesized
SQVSPFKIPIEELEDRVFVNCNTTIYRASSLSNCKHTSSVEE

SEQ ID NO: 2483 - protein, 42 aa, Artificial Sequence
  chemically synthesized
SQVSPFKIPIEELEDRVFVNCNTTIYRASSLSNCRGTSSVEE

SEQ ID NO: 2484 - protein, 42 aa, Artificial Sequence
  chemically synthesized
SQVSPFKIPIEELEDRVFVNCNTTIYRASSLSNCRATSSVEE

SEQ ID NO: 2485 - protein, 42 aa, Artificial Sequence
  chemically synthesized
SQVSPFKIPIEELEDRVFVNCNTTIYRASSLSNCRITSSVEE

SEQ ID NO: 2486 - protein, 42 aa, Artificial Sequence
  chemically synthesized
SQVSPFKIPIEELEDRVFVNCNTTIYRASSLSNCRLTSSVEE

SEQ ID NO: 2487 - protein, 42 aa, Artificial Sequence
  chemically synthesized
SQVSPFKIPIEELEDRVFVNCNTTIYRASSLSNCRMTSSVEE

SEQ ID NO: 2488 - protein, 42 aa, Artificial Sequence
  chemically synthesized
SQVSPFKIPIEELEDRVFVNCNTTIYRASSLSNCRVTSSVEE

SEQ ID NO: 2489 - protein, 42 aa, Artificial Sequence
  chemically synthesized
SQVSPFKIPIEELEDRVFVNCNTTIYRASSLSNCRHSSSVEE

SEQ ID NO: 2490 - protein, 42 aa, Artificial Sequence
  chemically synthesized
SQVSPFKIPIEELEDRVFVNCNTTIYRASSLSNCRHYSSVEE

SEQ ID NO: 2491 - protein, 42 aa, Artificial Sequence
  chemically synthesized
SQVSPFKIPIEELEDRVFVNCNTTIYRASSLSNCRHTTSVEE

SEQ ID NO: 2492 - protein, 42 aa, Artificial Sequence
  chemically synthesized
SQVSPFKIPIEELEDRVFVNCNTTIYRASSLSNCRHTYSVEE

SEQ ID NO: 2493 - protein, 42 aa, Artificial Sequence
  chemically synthesized
SQVSPFKIPIEELEDRVFVNCNTTIYRASSLSNCRHTSTVEE

SEQ ID NO: 2494 - protein, 42 aa, Artificial Sequence
  chemically synthesized
SQVSPFKIPIEELEDRVFVNCNTTIYRASSLSNCRHTSYVEE

SEQ ID NO: 2495 - protein, 42 aa, Artificial Sequence
  chemically synthesized
SQVSPFKIPIEELEDRVFVNCNTTIYRASSLSNCRHTSSIEE

SEQ ID NO: 2496 - protein, 42 aa, Artificial Sequence
  chemically synthesized
SQVSPFKIPIEELEDRVFVNCNTTIYRASSLSNCRHTSSLEE

SEQ ID NO: 2497 - protein, 42 aa, Artificial Sequence
  chemically synthesized
SQVSPFKIPIEELEDRVFVNCNTTIYRASSLSNCRHTSSFEE

SEQ ID NO: 2498 - protein, 42 aa, Artificial Sequence
  chemically synthesized
SQVSPFKIPIEELEDRVFVNCNTTIYRASSLSNCRHTSSHEE

SEQ ID NO: 2499 - protein, 42 aa, Artificial Sequence
  chemically synthesized
SQVSPFKIPIEELEDRVFVNCNTTIYRASSLSNCRHTSSMEE

SEQ ID NO: 2500 - protein, 42 aa, Artificial Sequence
  chemically synthesized
SQVSPFKIPIEELEDRVFVNCNTTIYRASSLSNCRHTSSVDE

SEQ ID NO: 2501 - protein, 42 aa, Artificial Sequence
  chemically synthesized
  misc_feature (41)..(41): Xaa can be a proteinogenic, non-proteinogenic or synthetic amino acid like ornithin or selenocystein
SQVSPFKIPIEELEDRVFVNCNTTIYRASSLSNCRHTSSVXE

SEQ ID NO: 2502 - protein, 42 aa, Artificial Sequence
  chemically synthesized
SQVSPFKIPIEELEDRVFVNCNTTIYRASSLSNCRHTSSVED

SEQ ID NO: 2503 - protein, 42 aa, Artificial Sequence
  chemically synthesized
  misc_feature (42)..(42): Xaa can be a proteinogenic, non-proteinogenic or synthetic amino acid like ornithin or selenocystein
SQVSPFKIPIEELEDRVFVNCNTTIYRASSLSNCRHTSSVEX

SEQ ID NO: 2504 - protein, 42 aa, Artificial Sequence
  chemically synthesized
SQVSAFKIPIEELEDRVFVNCNTTIYRASSLSNCRHTSSVEE

SEQ ID NO: 2505 - protein, 42 aa, Artificial Sequence
  chemically synthesized
SQVSGFKIPIEELEDRVFVNCNTTIYRASSLSNCRHTSSVEE

SEQ ID NO: 2506 - protein, 42 aa, Artificial Sequence
  chemically synthesized
SQVSPFKIAIEELEDRVFVNCNTTIYRASSLSNCRHTSSVEE

SEQ ID NO: 2507 - protein, 42 aa, Artificial Sequence
  chemically synthesized
SQVSPFKIGIEELEDRVFVNCNTTIYRASSLSNCRHTSSVEE

SEQ ID NO: 2508 - protein, 42 aa, Artificial Sequence; identical to SEQ ID NO: 71
  chemically synthesized

SEQ ID NO: 2509 - protein, 42 aa, Artificial Sequence; identical to SEQ ID NO: 190
  chemically synthesized

SEQ ID NO: 2510 - protein, 42 aa, Artificial Sequence
  chemically synthesized
YQVSPFKIPIEELEDRVFVNCNTSLYRASSLSNCRHTSSVEE

SEQ ID NO: 2511 - protein, 42 aa, Artificial Sequence; identical to SEQ ID NO: 310
  chemically synthesized

SEQ ID NO: 2512 - protein, 42 aa, Artificial Sequence; identical to SEQ ID NO: 428
  chemically synthesized

SEQ ID NO: 2513 - protein, 42 aa, Artificial Sequence
  chemically synthesized
SQISPFKIPIEELEDRVFVNCNTSLYRASSLSNCRHTSSVEE

SEQ ID NO: 2514 - protein, 42 aa, Artificial Sequence
  chemically synthesized
SQPSPFKIPIEELEDRVFVNCNTSLYRASSLSNCRHTSSVEE

SEQ ID NO: 2515 - protein, 42 aa, Artificial Sequence
  chemically synthesized
SQFSPFKIPIEELEDRVFVNCNTSLYRASSLSNCRHTSSVEE

SEQ ID NO: 2516 - protein, 42 aa, Artificial Sequence; identical to SEQ ID NO: 547
  chemically synthesized

SEQ ID NO: 2517 - protein, 42 aa, Artificial Sequence
  chemically synthesized
SQVYPFKIPIEELEDRVFVNCNTSLYRASSLSNCRHTSSVEE

SEQ ID NO: 2518 - protein, 42 aa, Artificial Sequence
  chemically synthesized
SQVSPWKIPIEELEDRVFVNCNTSLYRASSLSNCRHTSSVEE

SEQ ID NO: 2519 - protein, 42 aa, Artificial Sequence
  chemically synthesized
SQVSPYKIPIEELEDRVFVNCNTSLYRASSLSNCRHTSSVEE

SEQ ID NO: 2520 - protein, 42 aa, Artificial Sequence
  chemically synthesized
SQVSPHKIPIEELEDRVFVNCNTSLYRASSLSNCRHTSSVEE

SEQ ID NO: 2521 - protein, 42 aa, Artificial Sequence
  chemically synthesized
SQVSPFRIPIEELEDRVFVNCNTSLYRASSLSNCRHTSSVEE

SEQ ID NO: 2522 - protein, 42 aa, Artificial Sequence
  chemically synthesized
SQVSPFHIPIEELEDRVFVNCNTSLYRASSLSNCRHTSSVEE

SEQ ID NO: 2523 - protein, 42 aa, Artificial Sequence
  chemically synthesized
  misc_feature (7)..(7): Xaa can be a proteinogenic, non-proteinogenic or synthetic amino acid like ornithin or selenocystein
SQVSPFXIPIEELEDRVFVNCNTSLYRASSLSNCRHTSSVEE

SEQ ID NO: 2524 - protein, 42 aa, Artificial Sequence; identical to SEQ ID NO: 786
  chemically synthesized

SEQ ID NO: 2525 - protein, 42 aa, Artificial Sequence
  chemically synthesized
SQVSPFKHPIEELEDRVFVNCNTSLYRASSLSNCRHTSSVEE

SEQ ID NO: 2526 - protein, 42 aa, Artificial Sequence
  chemically synthesized
SQVSPFKVPIEELEDRVFVNCNTSLYRASSLSNCRHTSSVEE

SEQ ID NO: 2527 - protein, 42 aa, Artificial Sequence
  chemically synthesized
SQVSPFKFPIEELEDRVFVNCNTSLYRASSLSNCRHTSSVEE

SEQ ID NO: 2528 - protein, 42 aa, Artificial Sequence
  chemically synthesized
SQVSPFKMPIEELEDRVFVNCNTSLYRASSLSNCRHTSSVEE

SEQ ID NO: 2529 - protein, 42 aa, Artificial Sequence; identical to SEQ ID NO: 904
  chemically synthesized

SEQ ID NO: 2530 - protein, 42 aa, Artificial Sequence
  chemically synthesized
SQVSPFKIPHEELEDRVFVNCNTSLYRASSLSNCRHTSSVEE

SEQ ID NO: 2531 - protein, 42 aa, Artificial Sequence
  chemically synthesized
SQVSPFKIPVEELEDRVFVNCNTSLYRASSLSNCRHTSSVEE

SEQ ID NO: 2532 - protein, 42 aa, Artificial Sequence
  chemically synthesized
SQVSPFKIPFEELEDRVFVNCNTSLYRASSLSNCRHTSSVEE

SEQ ID NO: 2533 - protein, 42 aa, Artificial Sequence
  chemically synthesized
SQVSPFKIPMEELEDRVFVNCNTSLYRASSLSNCRHTSSVEE

SEQ ID NO: 2534 - protein, 42 aa, Artificial Sequence; identical to SEQ ID NO: 1024
  chemically synthesized

SEQ ID NO: 2535 - protein, 42 aa, Artificial Sequence
  chemically synthesized
  misc_feature (11)..(11): Xaa can be a proteinogenic, non-proteinogenic or synthetic amino acid like ornithin or selenocystein
SQVSPFKIPIXELEDRVFVNCNTSLYRASSLSNCRHTSSVEE

SEQ ID NO: 2536 - protein, 42 aa, Artificial Sequence; identical to SEQ ID NO: 1144
  chemically synthesized

SEQ ID NO: 2537 - protein, 42 aa, Artificial Sequence
  chemically synthesized
  misc_feature (12)..(12): Xaa can be a proteinogenic, non-proteinogenic or synthetic amino acid like ornithin or selenocystein
SQVSPFKIPIEXLEDRVFVNCNTSLYRASSLSNCRHTSSVEE

SEQ ID NO: 2538 - protein, 42 aa, Artificial Sequence
  chemically synthesized
SQVSPFKIPIEEVEDRVFVNCNTSLYRASSLSNCRHTSSVEE

SEQ ID NO: 2539 - protein, 42 aa, Artificial Sequence; identical to SEQ ID NO: 1261
  chemically synthesized

SEQ ID NO: 2540 - protein, 42 aa, Artificial Sequence
  chemically synthesized
SQVSPFKIPIEEFEDRVFVNCNTSLYRASSLSNCRHTSSVEE

SEQ ID NO: 2541 - protein, 42 aa, Artificial Sequence
  chemically synthesized
SQVSPFKIPIEEHEDRVFVNCNTSLYRASSLSNCRHTSSVEE

SEQ ID NO: 2542 - protein, 42 aa, Artificial Sequence
  chemically synthesized
SQVSPFKIPIEEMEDRVFVNCNTSLYRASSLSNCRHTSSVEE

SEQ ID NO: 2543 - protein, 42 aa, Artificial Sequence; identical to SEQ ID NO: 1381
  chemically synthesized

SEQ ID NO: 2544 - protein, 42 aa, Artificial Sequence
  chemically synthesized
  misc_feature (14)..(14): Xaa can be a proteinogenic, non-proteinogenic or synthetic amino acid like ornithin or selenocystein
SQVSPFKIPIEELXDRVFVNCNTSLYRASSLSNCRHTSSVEE

SEQ ID NO: 2545 - protein, 42 aa, Artificial Sequence
  chemically synthesized
  misc_feature (15)..(15): Xaa can be a proteinogenic, non-proteinogenic or synthetic amino acid like ornithin or selenocystein
SQVSPFKIPIEELEXRVFVNCNTSLYRASSLSNCRHTSSVEE

SEQ ID NO: 2546 - protein, 42 aa, Artificial Sequence
  chemically synthesized
SQVSPFKIPIEELEERVFVNCNTSLYRASSLSNCRHTSSVEE

SEQ ID NO: 2547 - protein, 42 aa, Artificial Sequence; identical to SEQ ID NO: 1500
  chemically synthesized

SEQ ID NO: 2548 - protein, 42 aa, Artificial Sequence
  chemically synthesized
SQVSPFKIPIEELEDHVFVNCNTSLYRASSLSNCRHTSSVEE

SEQ ID NO: 2549 - protein, 42 aa, Artificial Sequence
  chemically synthesized
  misc_feature (16)..(16): Xaa can be a proteinogenic, non-proteinogenic or synthetic amino acid like ornithin or selenocystein
SQVSPFKIPIEELEDXVFVNCNTSLYRASSLSNCRHTSSVEE

SEQ ID NO: 2550 - protein, 42 aa, Artificial Sequence; identical to SEQ ID NO: 1617
  chemically synthesized

SEQ ID NO: 2551 - protein, 42 aa, Artificial Sequence
  chemically synthesized
SQVSPFKIPIEELEDRLFVNCNTSLYRASSLSNCRHTSSVEE

SEQ ID NO: 2552 - protein, 42 aa, Artificial Sequence
  chemically synthesized
SQVSPFKIPIEELEDRFFVNCNTSLYRASSLSNCRHTSSVEE

SEQ ID NO: 2553 - protein, 42 aa, Artificial Sequence
  chemically synthesized
SQVSPFKIPIEELEDRHFVNCNTSLYRASSLSNCRHTSSVEE

SEQ ID NO: 2554 - protein, 42 aa, Artificial Sequence
  chemically synthesized
SQVSPFKIPIEELEDRMFVNCNTSLYRASSLSNCRHTSSVEE

SEQ ID NO: 2555 - protein, 42 aa, Artificial Sequence; identical to SEQ ID NO: 1734
  chemically synthesized

SEQ ID NO: 2556 - protein, 42 aa, Artificial Sequence
  chemically synthesized
SQVSPFKIPIEELEDRVLVNCNTSLYRASSLSNCRHTSSVEE

SEQ ID NO: 2557 - protein, 42 aa, Artificial Sequence
  chemically synthesized
SQVSPFKIPIEELEDRVVVNCNTSLYRASSLSNCRHTSSVEE

SEQ ID NO: 2558 - protein, 42 aa, Artificial Sequence
  chemically synthesized
SQVSPFKIPIEELEDRVHVNCNTSLYRASSLSNCRHTSSVEE

SEQ ID NO: 2559 - protein, 42 aa, Artificial Sequence
  chemically synthesized
SQVSPFKIPIEELEDRVMVNCNTSLYRASSLSNCRHTSSVEE

SEQ ID NO: 2560 - protein, 42 aa, Artificial Sequence; identical to SEQ ID NO: 1851
  chemically synthesized

SEQ ID NO: 2561 - protein, 42 aa, Artificial Sequence
  chemically synthesized
SQVSPFKIPIEELEDRVFLNCNTSLYRASSLSNCRHTSSVEE

SEQ ID NO: 2562 - protein, 42 aa, Artificial Sequence
  chemically synthesized
SQVSPFKIPIEELEDRVFFNCNTSLYRASSLSNCRHTSSVEE

SEQ ID NO: 2563 - protein, 42 aa, Artificial Sequence
  chemically synthesized
SQVSPFKIPIEELEDRVFHNCNTSLYRASSLSNCRHTSSVEE

SEQ ID NO: 2564 - protein, 42 aa, Artificial Sequence
  chemically synthesized
SQVSPFKIPIEELEDRVFMNCNTSLYRASSLSNCRHTSSVEE

SEQ ID NO: 2565 - protein, 42 aa, Artificial Sequence; identical to SEQ ID NO: 1972
  chemically synthesized

SEQ ID NO: 2566 - protein, 42 aa, Artificial Sequence
  chemically synthesized
SQVSPFKIPIEELEDRVFVNSNTSLYRASSLSNCRHTSSVEE

SEQ ID NO: 2567 - protein, 42 aa, Artificial Sequence
  chemically synthesized
SQVSPFKIPIEELEDRVFVNGNTSLYRASSLSNCRHTSSVEE

SEQ ID NO: 2568 - protein, 42 aa, Artificial Sequence
  chemically synthesized
SQVSPFKIPIEELEDRVFVNANTSLYRASSLSNCRHTSSVEE

SEQ ID NO: 2569 - protein, 42 aa, Artificial Sequence; identical to SEQ ID NO: 2213
  chemically synthesized

SEQ ID NO: 2570 - protein, 42 aa, Artificial Sequence; identical to SEQ ID NO: 2333
  chemically synthesized

SEQ ID NO: 2571 - protein, 42 aa, Artificial Sequence
  chemically synthesized
SQVSPFKIPIEELEDRVFVNCNYSLYRASSLSNCRHTSSVEE

SEQ ID NO: 2572 - protein, 42 aa, Artificial Sequence; identical to SEQ ID NO: 2453
  chemically synthesized

SEQ ID NO: 2573 - protein, 42 aa, Artificial Sequence
  chemically synthesized
SQVSPFKIPIEELEDRVFVNCNTYLYRASSLSNCRHTSSVEE

SEQ ID NO: 2574 - protein, 42 aa, Artificial Sequence
  chemically synthesized
SQVSPFKIPIEELEDRVFVNCNTSLWRASSLSNCRHTSSVEE

SEQ ID NO: 2575 - protein, 42 aa, Artificial Sequence
  chemically synthesized
SQVSPFKIPIEELEDRVFVNCNTSLFRASSLSNCRHTSSVEE

SEQ ID NO: 2576 - protein, 42 aa, Artificial Sequence
  chemically synthesized
SQVSPFKIPIEELEDRVFVNCNTSLSRASSLSNCRHTSSVEE

SEQ ID NO: 2577 - protein, 42 aa, Artificial Sequence
  chemically synthesized
SQVSPFKIPIEELEDRVFVNCNTSLTRASSLSNCRHTSSVEE

SEQ ID NO: 2578 - protein, 42 aa, Artificial Sequence
  chemically synthesized
  misc_feature (27)..(27): Xaa can be a proteinogenic, non-proteinogenic or synthetic amino acid like ornithin or selenocystein
SQVSPFKIPIEELEDRVFVNCNTSLYXASSLSNCRHTSSVEE

SEQ ID NO: 2579 - protein, 42 aa, Artificial Sequence
  chemically synthesized
SQVSPFKIPIEELEDRVFVNCNTSLYHASSLSNCRHTSSVEE

SEQ ID NO: 2580 - protein, 42 aa, Artificial Sequence
  chemically synthesized
SQVSPFKIPIEELEDRVFVNCNTSLYKASSLSNCRHTSSVEE

SEQ ID NO: 2581 - protein, 42 aa, Artificial Sequence
  chemically synthesized
SQVSPFKIPIEELEDRVFVNCNTSLYRGSSLSNCRHTSSVEE

SEQ ID NO: 2582 - protein, 42 aa, Artificial Sequence
  chemically synthesized
SQVSPFKIPIEELEDRVFVNCNTSLYRATSLSNCRHTSSVEE

SEQ ID NO: 2583 - protein, 42 aa, Artificial Sequence
  chemically synthesized
SQVSPFKIPIEELEDRVFVNCNTSLYRAYSLSNCRHTSSVEE

SEQ ID NO: 2584 - protein, 42 aa, Artificial Sequence
  chemically synthesized
SQVSPFKIPIEELEDRVFVNCNTSLYRASTLSNCRHTSSVEE

SEQ ID NO: 2585 - protein, 42 aa, Artificial Sequence
  chemically synthesized
SQVSPFKIPIEELEDRVFVNCNTSLYRASYLSNCRHTSSVEE

SEQ ID NO: 2586 - protein, 42 aa, Artificial Sequence
  chemically synthesized
SQVSPFKIPIEELEDRVFVNCNTSLYRASSISNCRHTSSVEE

SEQ ID NO: 2587 - protein, 42 aa, Artificial Sequence
  chemically synthesized
SQVSPFKIPIEELEDRVFVNCNTSLYRASSVSNCRHTSSVEE

SEQ ID NO: 2588 - protein, 42 aa, Artificial Sequence
  chemically synthesized
SQVSPFKIPIEELEDRVFVNCNTSLYRASSFSNCRHTSSVEE

SEQ ID NO: 2589 - protein, 42 aa, Artificial Sequence
  chemically synthesized
SQVSPFKIPIEELEDRVFVNCNTSLYRASSMSNCRHTSSVEE

SEQ ID NO: 2590 - protein, 42 aa, Artificial Sequence
  chemically synthesized
SQVSPFKIPIEELEDRVFVNCNTSLYRASSHSNCRHTSSVEE

SEQ ID NO: 2591 - protein, 42 aa, Artificial Sequence
  chemically synthesized
SQVSPFKIPIEELEDRVFVNCNTSLYRASSLTNCRHTSSVEE

SEQ ID NO: 2592 - protein, 42 aa, Artificial Sequence
  chemically synthesized
SQVSPFKIPIEELEDRVFVNCNTSLYRASSLYNCRHTSSVEE

SEQ ID NO: 2593 - protein, 42 aa, Artificial Sequence
  chemically synthesized
SQVSPFKIPIEELEDRVFVNCNTSLYRASSLSQCRHTSSVEE

SEQ ID NO: 2594 - protein, 42 aa, Artificial Sequence
  chemically synthesized
SQVSPFKIPIEELEDRVFVNCNTSLYRASSLSNSRHTSSVEE

SEQ ID NO: 2595 - protein, 42 aa, Artificial Sequence
  chemically synthesized
SQVSPFKIPIEELEDRVFVNCNTSLYRASSLSNGRHTSSVEE

SEQ ID NO: 2596 - protein, 42 aa, Artificial Sequence
  chemically synthesized
SQVSPFKIPIEELEDRVFVNCNTSLYRASSLSNARHTSSVEE

SEQ ID NO: 2597 - protein, 42 aa, Artificial Sequence
  chemically synthesized
  misc_feature (35)..(35): Xaa can be a proteinogenic, non-proteinogenic or synthetic amino acid like ornithin or selenocystein
SQVSPFKIPIEELEDRVFVNCNTSLYRASSLSNCXHTSSVEE

SEQ ID NO: 2598 - protein, 42 aa, Artificial Sequence
  chemically synthesized
SQVSPFKIPIEELEDRVFVNCNTSLYRASSLSNCHHTSSVEE

SEQ ID NO: 2599 - protein, 42 aa, Artificial Sequence
  chemically synthesized
SQVSPFKIPIEELEDRVFVNCNTSLYRASSLSNCKHTSSVEE

SEQ ID NO: 2600 - protein, 42 aa, Artificial Sequence
  chemically synthesized
SQVSPFKIPIEELEDRVFVNCNTSLYRASSLSNCRGTSSVEE

SEQ ID NO: 2601 - protein, 42 aa, Artificial Sequence
  chemically synthesized
SQVSPFKIPIEELEDRVFVNCNTSLYRASSLSNCRATSSVEE

SEQ ID NO: 2602 - protein, 42 aa, Artificial Sequence
  chemically synthesized
SQVSPFKIPIEELEDRVFVNCNTSLYRASSLSNCRITSSVEE

SEQ ID NO: 2603 - protein, 42 aa, Artificial Sequence
  chemically synthesized
SQVSPFKIPIEELEDRVFVNCNTSLYRASSLSNCRLTSSVEE

SEQ ID NO: 2604 - protein, 42 aa, Artificial Sequence
  chemically synthesized
SQVSPFKIPIEELEDRVFVNCNTSLYRASSLSNCRMTSSVEE

SEQ ID NO: 2605 - protein, 42 aa, Artificial Sequence
  chemically synthesized
SQVSPFKIPIEELEDRVFVNCNTSLYRASSLSNCRVTSSVEE

SEQ ID NO: 2606 - protein, 42 aa, Artificial Sequence
  chemically synthesized
SQVSPFKIPIEELEDRVFVNCNTSLYRASSLSNCRHSSSVEE

SEQ ID NO: 2607 - protein, 42 aa, Artificial Sequence
  chemically synthesized
SQVSPFKIPIEELEDRVFVNCNTSLYRASSLSNCRHYSSVEE

SEQ ID NO: 2608 - protein, 42 aa, Artificial Sequence
  chemically synthesized
SQVSPFKIPIEELEDRVFVNCNTSLYRASSLSNCRHTTSVEE

SEQ ID NO: 2609 - protein, 42 aa, Artificial Sequence
  chemically synthesized
SQVSPFKIPIEELEDRVFVNCNTSLYRASSLSNCRHTYSVEE

SEQ ID NO: 2610 - protein, 42 aa, Artificial Sequence
  chemically synthesized
SQVSPFKIPIEELEDRVFVNCNTSLYRASSLSNCRHTSTVEE

SEQ ID NO: 2611 - protein, 42 aa, Artificial Sequence
  chemically synthesized
SQVSPFKIPIEELEDRVFVNCNTSLYRASSLSNCRHTSYVEE

SEQ ID NO: 2612 - protein, 42 aa, Artificial Sequence
  chemically synthesized
SQVSPFKIPIEELEDRVFVNCNTSLYRASSLSNCRHTSSIEE

SEQ ID NO: 2613 - protein, 42 aa, Artificial Sequence
  chemically synthesized
SQVSPFKIPIEELEDRVFVNCNTSLYRASSLSNCRHTSSLEE

SEQ ID NO: 2614 - protein, 42 aa, Artificial Sequence
  chemically synthesized
SQVSPFKIPIEELEDRVFVNCNTSLYRASSLSNCRHTSSFEE

SEQ ID NO: 2615 - protein, 42 aa, Artificial Sequence
  chemically synthesized
SQVSPFKIPIEELEDRVFVNCNTSLYRASSLSNCRHTSSHEE

SEQ ID NO: 2616 - protein, 42 aa, Artificial Sequence
  chemically synthesized
SQVSPFKIPIEELEDRVFVNCNTSLYRASSLSNCRHTSSMEE

SEQ ID NO: 2617 - protein, 42 aa, Artificial Sequence
  chemically synthesized
SQVSPFKIPIEELEDRVFVNCNTSLYRASSLSNCRHTSSVDE

SEQ ID NO: 2618 - protein, 42 aa, Artificial Sequence
  chemically synthesized
  misc_feature (41)..(41): Xaa can be a proteinogenic, non-proteinogenic or synthetic amino acid like ornithin or selenocystein
SQVSPFKIPIEELEDRVFVNCNTSLYRASSLSNCRHTSSVXE

SEQ ID NO: 2619 - protein, 42 aa, Artificial Sequence
  chemically synthesized
SQVSPFKIPIEELEDRVFVNCNTSLYRASSLSNCRHTSSVED

SEQ ID NO: 2620 - protein, 42 aa, Artificial Sequence
  chemically synthesized
  misc_feature (42)..(42): Xaa can be a proteinogenic, non-proteinogenic or synthetic amino acid like ornithin or selenocystein
SQVSPFKIPIEELEDRVFVNCNTSLYRASSLSNCRHTSSVEX

SEQ ID NO: 2621 - protein, 42 aa, Artificial Sequence
  chemically synthesized
SQVSAFKIPIEELEDRVFVNCNTSLYRASSLSNCRHTSSVEE

SEQ ID NO: 2622 - protein, 42 aa, Artificial Sequence
  chemically synthesized
SQVSGFKIPIEELEDRVFVNCNTSLYRASSLSNCRHTSSVEE

SEQ ID NO: 2623 - protein, 42 aa, Artificial Sequence
  chemically synthesized
SQVSPFKIAIEELEDRVFVNCNTSLYRASSLSNCRHTSSVEE

SEQ ID NO: 2624 - protein, 42 aa, Artificial Sequence
  chemically synthesized
SQVSPFKIGIEELEDRVFVNCNTSLYRASSLSNCRHTSSVEE

SEQ ID NO: 2625 - protein, 42 aa, Artificial Sequence; identical to SEQ ID NO: 78
  chemically synthesized

SEQ ID NO: 2626 - protein, 42 aa, Artificial Sequence; identical to SEQ ID NO: 197
  chemically synthesized

SEQ ID NO: 2627 - protein, 42 aa, Artificial Sequence; identical to SEQ ID NO: 197
  chemically synthesized

SEQ ID NO: 2628 - protein, 42 aa, Artificial Sequence; identical to SEQ ID NO: 317
  chemically synthesized

SEQ ID NO: 2629 - protein, 42 aa, Artificial Sequence; identical to SEQ ID NO: 435
  chemically synthesized

SEQ ID NO: 2630 - protein, 42 aa, Artificial Sequence
  chemically synthesized
SQISPFKIPIEELEDRVFVNCNTSITRASSLSNCRHTSSVEE

SEQ ID NO: 2631 - protein, 42 aa, Artificial Sequence
  chemically synthesized
SQPSPFKIPIEELEDRVFVNCNTSITRASSLSNCRHTSSVEE

SEQ ID NO: 2632 - protein, 42 aa, Artificial Sequence
  chemically synthesized
SQFSPFKIPIEELEDRVFVNCNTSITRASSLSNCRHTSSVEE

SEQ ID NO: 2633 - protein, 42 aa, Artificial Sequence; identical to SEQ ID NO: 554
  chemically synthesized

SEQ ID NO: 2634 - protein, 42 aa, Artificial Sequence
  chemically synthesized
SQVYPFKIPIEELEDRVFVNCNTSITRASSLSNCRHTSSVEE

SEQ ID NO: 2635 - protein, 42 aa, Artificial Sequence
  chemically synthesized
SQVSPWKIPIEELEDRVFVNCNTSITRASSLSNCRHTSSVEE

SEQ ID NO: 2636 - protein, 42 aa, Artificial Sequence
  chemically synthesized
SQVSPTKIPIEELEDRVFVNCNTSITRASSLSNCRHTSSVEE

SEQ ID NO: 2637 - protein, 42 aa, Artificial Sequence
  chemically synthesized
SQVSPHKIPIEELEDRVFVNCNTSITRASSLSNCRHTSSVEE

SEQ ID NO: 2638 - protein, 42 aa, Artificial Sequence
  chemically synthesized
SQVSPFRIPIEELEDRVFVNCNTSITRASSLSNCRHTSSVEE

SEQ ID NO: 2639 - protein, 42 aa, Artificial Sequence
  chemically synthesized
SQVSPFHIPIEELEDRVFVNCNTSITRASSLSNCRHTSSVEE

SEQ ID NO: 2640 - protein, 42 aa, Artificial Sequence
  chemically synthesized
  misc_feature (7)..(7): Xaa can be a proteinogenic, non-proteinogenic or synthetic amino acid like ornithin or selenocystein
SQVSPFXIPIEELEDRVFVNCNTSITRASSLSNCRHTSSVEE

SEQ ID NO: 2641 - protein, 42 aa, Artificial Sequence; identical to SEQ ID NO: 793
  chemically synthesized

SEQ ID NO: 2642 - protein, 42 aa, Artificial Sequence
  chemically synthesized
SQVSPFKHPIEELEDRVFVNCNTSITRASSLSNCRHTSSVEE

SEQ ID NO: 2643 - protein, 42 aa, Artificial Sequence
  chemically synthesized
SQVSPFKVPIEELEDRVFVNCNTSITRASSLSNCRHTSSVEE

SEQ ID NO: 2644 - protein, 42 aa, Artificial Sequence
  chemically synthesized
SQVSPFKFPIEELEDRVFVNCNTSITRASSLSNCRHTSSVEE

SEQ ID NO: 2645 - protein, 42 aa, Artificial Sequence
  chemically synthesized
SQVSPFKMPIEELEDRVFVNCNTSITRASSLSNCRHTSSVEE

SEQ ID NO: 2646 - protein, 42 aa, Artificial Sequence; identical to SEQ ID NO: 911
  chemically synthesized

SEQ ID NO: 2647 - protein, 42 aa, Artificial Sequence
  chemically synthesized
SQVSPFKIPHEELEDRVFVNCNTSITRASSLSNCRHTSSVEE

SEQ ID NO: 2648 - protein, 42 aa, Artificial Sequence
  chemically synthesized
SQVSPFKIPVEELEDRVFVNCNTSITRASSLSNCRHTSSVEE

SEQ ID NO: 2649 - protein, 42 aa, Artificial Sequence
  chemically synthesized
SQVSPFKIPFEELEDRVFVNCNTSITRASSLSNCRHTSSVEE

SEQ ID NO: 2650 - protein, 42 aa, Artificial Sequence
  chemically synthesized
SQVSPFKIPMEELEDRVFVNCNTSITRASSLSNCRHTSSVEE

SEQ ID NO: 2651 - protein, 42 aa, Artificial Sequence; identical to SEQ ID NO: 1031
  chemically synthesized

SEQ ID NO: 2652 - protein, 42 aa, Artificial Sequence
  chemically synthesized
  misc_feature (11)..(11): Xaa can be a proteinogenic, non-proteinogenic or synthetic amino acid like ornithin or selenocystein
SQVSPFKIPIXELEDRVFVNCNTSITRASSLSNCRHTSSVEE

SEQ ID NO: 2653 - protein, 42 aa, Artificial Sequence; identical to SEQ ID NO: 1151
  chemically synthesized

SEQ ID NO: 2654 - protein, 42 aa, Artificial Sequence
  chemically synthesized
  misc_feature (12)..(12): Xaa can be a proteinogenic, non-proteinogenic or synthetic amino acid like ornithin or selenocystein
SQVSPFKIPIEXLEDRVFVNCNTSITRASSLSNCRHTSSVEE

SEQ ID NO: 2655 - protein, 42 aa, Artificial Sequence
  chemically synthesized
SQVSPFKIPIEEVEDRVFVNCNTSITRASSLSNCRHTSSVEE

SEQ ID NO: 2656 - protein, 42 aa, Artificial Sequence; identical to SEQ ID NO: 1268
  chemically synthesized

SEQ ID NO: 2657 - protein, 42 aa, Artificial Sequence
  chemically synthesized
SQVSPFKIPIEEFEDRVFVNCNTSITRASSLSNCRHTSSVEE

SEQ ID NO: 2658 - protein, 42 aa, Artificial Sequence
  chemically synthesized
SQVSPFKIPIEEHEDRVFVNCNTSITRASSLSNCRHTSSVEE

SEQ ID NO: 2659 - protein, 42 aa, Artificial Sequence
  chemically synthesized
SQVSPFKIPIEEMEDRVFVNCNTSITRASSLSNCRHTSSVEE

SEQ ID NO: 2660 - protein, 42 aa, Artificial Sequence; identical to SEQ ID NO: 1388
  chemically synthesized

SEQ ID NO: 2661 - protein, 42 aa, Artificial Sequence
  chemically synthesized
  misc_feature (14)..(14): Xaa can be a proteinogenic, non-proteinogenic or synthetic amino acid like ornithin or selenocystein
SQVSPFKIPIEELXDRVFVNCNTSITRASSLSNCRHTSSVEE

SEQ ID NO: 2662 - protein, 42 aa, Artificial Sequence
  chemically synthesized
  misc_feature (15)..(15): Xaa can be a proteinogenic, non-proteinogenic or synthetic amino acid like ornithin or selenocystein
SQVSPFKIPIEELEXRVFVNCNTSITRASSLSNCRHTSSVEE

SEQ ID NO: 2663 - protein, 42 aa, Artificial Sequence
  chemically synthesized
SQVSPFKIPIEELEERVFVNCNTSITRASSLSNCRHTSSVEE

SEQ ID NO: 2664 - protein, 42 aa, Artificial Sequence; identical to SEQ ID NO: 1507
  chemically synthesized

SEQ ID NO: 2665 - protein, 42 aa, Artificial Sequence
  chemically synthesized
SQVSPFKIPIEELEDHVFVNCNTSITRASSLSNCRHTSSVEE

SEQ ID NO: 2666 - protein, 42 aa, Artificial Sequence
  chemically synthesized
  misc_feature (16)..(16): Xaa can be a proteinogenic, non-proteinogenic or synthetic amino acid like ornithin or selenocystein
SQVSPFKIPIEELEDXVFVNCNTSITRASSLSNCRHTSSVEE

SEQ ID NO: 2667 - protein, 42 aa, Artificial Sequence; identical to SEQ ID NO: 1624
  chemically synthesized

SEQ ID NO: 2668 - protein, 42 aa, Artificial Sequence
  chemically synthesized
SQVSPFKIPIEELEDRLFVNCNTSITRASSLSNCRHTSSVEE

SEQ ID NO: 2669 - protein, 42 aa, Artificial Sequence
  chemically synthesized
SQVSPFKIPIEELEDRFFVNCNTSITRASSLSNCRHTSSVEE

SEQ ID NO: 2670 - protein, 42 aa, Artificial Sequence
  chemically synthesized
SQVSPFKIPIEELEDRHFVNCNTSITRASSLSNCRHTSSVEE

SEQ ID NO: 2671 - protein, 42 aa, Artificial Sequence
  chemically synthesized
SQVSPFKIPIEELEDRMFVNCNTSITRASSLSNCRHTSSVEE

SEQ ID NO: 2672 - protein, 42 aa, Artificial Sequence; identical to SEQ ID NO: 1741
  chemically synthesized

SEQ ID NO: 2673 - protein, 42 aa, Artificial Sequence
  chemically synthesized
SQVSPFKIPIEELEDRVLVNCNTSITRASSLSNCRHTSSVEE

SEQ ID NO: 2674 - protein, 42 aa, Artificial Sequence
  chemically synthesized
SQVSPFKIPIEELEDRVVVNCNTSITRASSLSNCRHTSSVEE

SEQ ID NO: 2675 - protein, 42 aa, Artificial Sequence
  chemically synthesized
SQVSPFKIPIEELEDRVHVNCNTSITRASSLSNCRHTSSVEE

SEQ ID NO: 2676 - protein, 42 aa, Artificial Sequence
  chemically synthesized
SQVSPFKIPIEELEDRVMVNCNTSITRASSLSNCRHTSSVEE

SEQ ID NO: 2677 - protein, 42 aa, Artificial Sequence; identical to SEQ ID NO: 1858
  chemically synthesized

SEQ ID NO: 2678 - protein, 42 aa, Artificial Sequence
  chemically synthesized
SQVSPFKIPIEELEDRVFLNCNTSITRASSLSNCRHTSSVEE

SEQ ID NO: 2679 - protein, 42 aa, Artificial Sequence
  chemically synthesized
SQVSPFKIPIEELEDRVFFNCNTSITRASSLSNCRHTSSVEE

SEQ ID NO: 2680 - protein, 42 aa, Artificial Sequence
  chemically synthesized
SQVSPFKIPIEELEDRVFHNCNTSITRASSLSNCRHTSSVEE

SEQ ID NO: 2681 - protein, 42 aa, Artificial Sequence
  chemically synthesized
SQVSPFKIPIEELEDRVFMNCNTSITRASSLSNCRHTSSVEE

SEQ ID NO: 2682 - protein, 42 aa, Artificial Sequence; identical to SEQ ID NO: 1979
  chemically synthesized

SEQ ID NO: 2683 - protein, 42 aa, Artificial Sequence
  chemically synthesized
SQVSPFKIPIEELEDRVFVNSNTSITRASSLSNCRHTSSVEE

SEQ ID NO: 2684 - protein, 42 aa, Artificial Sequence
  chemically synthesized
SQVSPFKIPIEELEDRVFVNGNTSITRASSLSNCRHTSSVEE

SEQ ID NO: 2685 - protein, 42 aa, Artificial Sequence
  chemically synthesized
SQVSPFKIPIEELEDRVFVNANTSITRASSLSNCRHTSSVEE

SEQ ID NO: 2686 - protein, 42 aa, Artificial Sequence; identical to SEQ ID NO: 2220
  chemically synthesized

SEQ ID NO: 2687 - protein, 42 aa, Artificial Sequence; identical to SEQ ID NO: 2340
  chemically synthesized

SEQ ID NO: 2688 - protein, 42 aa, Artificial Sequence
  chemically synthesized
SQVSPFKIPIEELEDRVFVNCNYSITRASSLSNCRHTSSVEE

SEQ ID NO: 2689 - protein, 42 aa, Artificial Sequence; identical to SEQ ID NO: 2460
  chemically synthesized

SEQ ID NO: 2690 - protein, 42 aa, Artificial Sequence
  chemically synthesized
SQVSPFKIPIEELEDRVFVNCNTYITRASSLSNCRHTSSVEE

SEQ ID NO: 2691 - protein, 42 aa, Artificial Sequence
  chemically synthesized
SQVSPFKIPIEELEDRVFVNCNTSVTRASSLSNCRHTSSVEE

SEQ ID NO: 2692 - protein, 42 aa, Artificial Sequence; identical to SEQ ID NO: 2577
  chemically synthesized

SEQ ID NO: 2693 - protein, 42 aa, Artificial Sequence
  chemically synthesized
SQVSPFKIPIEELEDRVFVNCNTSHTRASSLSNCRHTSSVEE

SEQ ID NO: 2694 - protein, 42 aa, Artificial Sequence
  chemically synthesized
SQVSPFKIPIEELEDRVFVNCNTSFTRASSLSNCRHTSSVEE

SEQ ID NO: 2695 - protein, 42 aa, Artificial Sequence
  chemically synthesized
SQVSPFKIPIEELEDRVFVNCNTSMTRASSLSNCRHTSSVEE

SEQ ID NO: 2696 - protein, 42 aa, Artificial Sequence
  chemically synthesized
  misc_feature (27)..(27): Xaa can be a proteinogenic, non-proteinogenic or synthetic amino acid like ornithin or selenocystein
SQVSPFKIPIEELEDRVFVNCNTSITXASSLSNCRHTSSVEE

SEQ ID NO: 2697 - protein, 42 aa, Artificial Sequence
  chemically synthesized
SQVSPFKIPIEELEDRVFVNCNTSITHASSLSNCRHTSSVEE

SEQ ID NO: 2698 - protein, 42 aa, Artificial Sequence
  chemically synthesized
SQVSPFKIPIEELEDRVFVNCNTSITKASSLSNCRHTSSVEE

SEQ ID NO: 2699 - protein, 42 aa, Artificial Sequence
  chemically synthesized
SQVSPFKIPIEELEDRVFVNCNTSITRGSSLSNCRHTSSVEE

SEQ ID NO: 2700 - protein, 42 aa, Artificial Sequence
  chemically synthesized
SQVSPFKIPIEELEDRVFVNCNTSITRATSLSNCRHTSSVEE

SEQ ID NO: 2701 - protein, 42 aa, Artificial Sequence
  chemically synthesized
SQVSPFKIPIEELEDRVFVNCNTSITRAYSLSNCRHTSSVEE

SEQ ID NO: 2702 - protein, 42 aa, Artificial Sequence
  chemically synthesized
SQVSPFKIPIEELEDRVFVNCNTSITRASTLSNCRHTSSVEE

SEQ ID NO: 2703 - protein, 42 aa, Artificial Sequence
  chemically synthesized
SQVSPFKIPIEELEDRVFVNCNTSITRASYLSNCRHTSSVEE

SEQ ID NO: 2704 - protein, 42 aa, Artificial Sequence
  chemically synthesized
SQVSPFKIPIEELEDRVFVNCNTSITRASSISNCRHTSSVEE

SEQ ID NO: 2705 - protein, 42 aa, Artificial Sequence
  chemically synthesized
SQVSPFKIPIEELEDRVFVNCNTSITRASSVSNCRHTSSVEE

SEQ ID NO: 2706 - protein, 42 aa, Artificial Sequence
  chemically synthesized
SQVSPFKIPIEELEDRVFVNCNTSITRASSFSNCRHTSSVEE

SEQ ID NO: 2707 - protein, 42 aa, Artificial Sequence
  chemically synthesized
SQVSPFKIPIEELEDRVFVNCNTSITRASSMSNCRHTSSVEE

SEQ ID NO: 2708 - protein, 42 aa, Artificial Sequence
  chemically synthesized
SQVSPFKIPIEELEDRVFVNCNTSITRASSHSNCRHTSSVEE

SEQ ID NO: 2709 - protein, 42 aa, Artificial Sequence
  chemically synthesized
SQVSPFKIPIEELEDRVFVNCNTSITRASSLTNCRHTSSVEE

SEQ ID NO: 2710 - protein, 42 aa, Artificial Sequence
  chemically synthesized
SQVSPFKIPIEELEDRVFVNCNTSITRASSLYNCRHTSSVEE

SEQ ID NO: 2711 - protein, 42 aa, Artificial Sequence
  chemically synthesized
SQVSPFKIPIEELEDRVFVNCNTSITRASSLSQCRHTSSVEE

SEQ ID NO: 2712 - protein, 42 aa, Artificial Sequence
  chemically synthesized
SQVSPFKIPIEELEDRVFVNCNTSITRASSLSNSRHTSSVEE

SEQ ID NO: 2713 - protein, 42 aa, Artificial Sequence
  chemically synthesized
SQVSPFKIPIEELEDRVFVNCNTSITRASSLSNGRHTSSVEE

SEQ ID NO: 2714 - protein, 42 aa, Artificial Sequence
  chemically synthesized
SQVSPFKIPIEELEDRVFVNCNTSITRASSLSNARHTSSVEE

SEQ ID NO: 2715 - protein, 42 aa, Artificial Sequence
  chemically synthesized
  misc_feature (35)..(35): Xaa can be a proteinogenic, non-proteinogenic or synthetic amino acid like ornithin or selenocystein
SQVSPFKIPIEELEDRVFVNCNTSITRASSLSNCXHTSSVEE

SEQ ID NO: 2716 - protein, 42 aa, Artificial Sequence
  chemically synthesized
SQVSPFKIPIEELEDRVFVNCNTSITRASSLSNCHHTSSVEE

SEQ ID NO: 2717 - protein, 42 aa, Artificial Sequence
  chemically synthesized
SQVSPFKIPIEELEDRVFVNCNTSITRASSLSNCKHTSSVEE

SEQ ID NO: 2718 - protein, 42 aa, Artificial Sequence
  chemically synthesized
SQVSPFKIPIEELEDRVFVNCNTSITRASSLSNCRGTSSVEE

SEQ ID NO: 2719 - protein, 42 aa, Artificial Sequence
  chemically synthesized
SQVSPFKIPIEELEDRVFVNCNTSITRASSLSNCRATSSVEE

SEQ ID NO: 2720 - protein, 42 aa, Artificial Sequence
  chemically synthesized
SQVSPFKIPIEELEDRVFVNCNTSITRASSLSNCRITSSVEE

SEQ ID NO: 2721 - protein, 42 aa, Artificial Sequence
  chemically synthesized
SQVSPFKIPIEELEDRVFVNCNTSITRASSLSNCRLTSSVEE

SEQ ID NO: 2722 - protein, 42 aa, Artificial Sequence
  chemically synthesized
SQVSPFKIPIEELEDRVFVNCNTSITRASSLSNCRMTSSVEE

SEQ ID NO: 2723 - protein, 42 aa, Artificial Sequence
  chemically synthesized
SQVSPFKIPIEELEDRVFVNCNTSITRASSLSNCRVTSSVEE

SEQ ID NO: 2724 - protein, 42 aa, Artificial Sequence
  chemically synthesized
SQVSPFKIPIEELEDRVFVNCNTSITRASSLSNCRHSSSVEE

SEQ ID NO: 2725 - protein, 42 aa, Artificial Sequence
  chemically synthesized
SQVSPFKIPIEELEDRVFVNCNTSITRASSLSNCRHYSSVEE

SEQ ID NO: 2726 - protein, 42 aa, Artificial Sequence
  chemically synthesized
SQVSPFKIPIEELEDRVFVNCNTSITRASSLSNCRHTTSVEE

SEQ ID NO: 2727 - protein, 42 aa, Artificial Sequence
  chemically synthesized
SQVSPFKIPIEELEDRVFVNCNTSITRASSLSNCRHTYSVEE

SEQ ID NO: 2728 - protein, 42 aa, Artificial Sequence
  chemically synthesized
SQVSPFKIPIEELEDRVFVNCNTSITRASSLSNCRHTSTVEE

SEQ ID NO: 2729 - protein, 42 aa, Artificial Sequence
  chemically synthesized
SQVSPFKIPIEELEDRVFVNCNTSITRASSLSNCRHTSYVEE

SEQ ID NO: 2730 - protein, 42 aa, Artificial Sequence
  chemically synthesized
SQVSPFKIPIEELEDRVFVNCNTSITRASSLSNCRHTSSIEE

SEQ ID NO: 2731 - protein, 42 aa, Artificial Sequence
  chemically synthesized
SQVSPFKIPIEELEDRVFVNCNTSITRASSLSNCRHTSSLEE

SEQ ID NO: 2732 - protein, 42 aa, Artificial Sequence
  chemically synthesized
SQVSPFKIPIEELEDRVFVNCNTSITRASSLSNCRHTSSFEE

SEQ ID NO: 2733 - protein, 42 aa, Artificial Sequence
  chemically synthesized
SQVSPFKIPIEELEDRVFVNCNTSITRASSLSNCRHTSSHEE

SEQ ID NO: 2734 - protein, 42 aa, Artificial Sequence
  chemically synthesized
SQVSPFKIPIEELEDRVFVNCNTSITRASSLSNCRHTSSMEE

SEQ ID NO: 2735 - protein, 42 aa, Artificial Sequence
  chemically synthesized
SQVSPFKIPIEELEDRVFVNCNTSITRASSLSNCRHTSSVDE

SEQ ID NO: 2736 - protein, 42 aa, Artificial Sequence
  chemically synthesized
  misc_feature (41)..(41): Xaa can be a proteinogenic, non-proteinogenic or synthetic amino acid like ornithin or selenocystein
SQVSPFKIPIEELEDRVFVNCNTSITRASSLSNCRHTSSVXE

SEQ ID NO: 2737 - protein, 42 aa, Artificial Sequence
  chemically synthesized
SQVSPFKIPIEELEDRVFVNCNTSITRASSLSNCRHTSSVED

SEQ ID NO: 2738 - protein, 42 aa, Artificial Sequence
  chemically synthesized
  misc_feature (42)..(42): Xaa can be a proteinogenic, non-proteinogenic or synthetic amino acid like ornithin or selenocystein
SQVSPFKIPIEELEDRVFVNCNTSITRASSLSNCRHTSSVEX

SEQ ID NO: 2739 - protein, 42 aa, Artificial Sequence
  chemically synthesized
SQVSAFKIPIEELEDRVFVNCNTSITRASSLSNCRHTSSVEE

SEQ ID NO: 2740 - protein, 42 aa, Artificial Sequence
  chemically synthesized
SQVSGFKIPIEELEDRVFVNCNTSITRASSLSNCRHTSSVEE

SEQ ID NO: 2741 - protein, 42 aa, Artificial Sequence
  chemically synthesized
SQVSPFKIAIEELEDRVFVNCNTSITRASSLSNCRHTSSVEE

SEQ ID NO: 2742 - protein, 42 aa, Artificial Sequence
  chemically synthesized
SQVSPFKIGIEELEDRVFVNCNTSITRASSLSNCRHTSSVEE

SEQ ID NO: 2743 - protein, 42 aa, Artificial Sequence; identical to SEQ ID NO: 81
  chemically synthesized

SEQ ID NO: 2744 - protein, 42 aa, Artificial Sequence; identical to SEQ ID NO: 200
  chemically synthesized

SEQ ID NO: 2745 - protein, 42 aa, Artificial Sequence
  chemically synthesized
YQVSPFKIPIEELEDRVFVNCNTSIYKASSLSNCRHTSSVEE

SEQ ID NO: 2746 - protein, 42 aa, Artificial Sequence; identical to SEQ ID NO: 320
  chemically synthesized

SEQ ID NO: 2747 - protein, 42 aa, Artificial Sequence; identical to SEQ ID NO: 438
  chemically synthesized

SEQ ID NO: 2748 - protein, 42 aa, Artificial Sequence
  chemically synthesized
SQISPFKIPIEELEDRVFVNCNTSIYKASSLSNCRHTSSVEE

SEQ ID NO: 2749 - protein, 42 aa, Artificial Sequence
  chemically synthesized
SQPSPFKIPIEELEDRVFVNCNTSIYKASSLSNCRHTSSVEE

SEQ ID NO: 2750 - protein, 42 aa, Artificial Sequence
  chemically synthesized
SQFSPFKIPIEELEDRVFVNCNTSIYKASSLSNCRHTSSVEE

SEQ ID NO: 2751 - protein, 42 aa, Artificial Sequence; identical to SEQ ID NO: 557
  chemically synthesized

SEQ ID NO: 2752 - protein, 42 aa, Artificial Sequence
  chemically synthesized
SQVYPFKIPIEELEDRVFVNCNTSIYKASSLSNCRHTSSVEE

SEQ ID NO: 2753 - protein, 42 aa, Artificial Sequence
  chemically synthesized
SQVSPWKIPIEELEDRVFVNCNTSIYKASSLSNCRHTSSVEE

SEQ ID NO: 2754 - protein, 42 aa, Artificial Sequence
  chemically synthesized
SQVSPYKIPIEELEDRVFVNCNTSIYKASSLSNCRHTSSVEE

SEQ ID NO: 2755 - protein, 42 aa, Artificial Sequence
  chemically synthesized
SQVSPHKIPIEELEDRVFVNCNTSIYKASSLSNCRHTSSVEE

SEQ ID NO: 2756 - protein, 42 aa, Artificial Sequence
  chemically synthesized
SQVSPFRIPIEELEDRVFVNCNTSIYKASSLSNCRHTSSVEE

SEQ ID NO: 2757 - protein, 42 aa, Artificial Sequence
  chemically synthesized
SQVSPFHIPIEELEDRVFVNCNTSIYKASSLSNCRHTSSVEE

SEQ ID NO: 2758 - protein, 42 aa, Artificial Sequence
  chemically synthesized
  misc_feature (7)..(7): Xaa can be a proteinogenic, non-proteinogenic or synthetic amino acid like ornithin or selenocystein
SQVSPFXIPIEELEDRVFVNCNTSIYKASSLSNCRHTSSVEE

SEQ ID NO: 2759 - protein, 42 aa, Artificial Sequence; identical to SEQ ID NO: 796
  chemically synthesized

SEQ ID NO: 2760 - protein, 42 aa, Artificial Sequence
  chemically synthesized
SQVSPFKHPIEELEDRVFVNCNTSIYKASSLSNCRHTSSVEE

SEQ ID NO: 2761 - protein, 42 aa, Artificial Sequence
  chemically synthesized
SQVSPFKVPIEELEDRVFVNCNTSIYKASSLSNCRHTSSVEE

SEQ ID NO: 2762 - protein, 42 aa, Artificial Sequence
  chemically synthesized
SQVSPFKFPIEELEDRVFVNCNTSIYKASSLSNCRHTSSVEE

SEQ ID NO: 2763 - protein, 42 aa, Artificial Sequence
  chemically synthesized
SQVSPFKMPIEELEDRVFVNCNTSIYKASSLSNCRHTSSVEE

SEQ ID NO: 2764 - protein, 42 aa, Artificial Sequence; identical to SEQ ID NO: 914
  chemically synthesized

SEQ ID NO: 2765 - protein, 42 aa, Artificial Sequence
  chemically synthesized
SQVSPFKIPHEELEDRVFVNCNTSIYKASSLSNCRHTSSVEE

SEQ ID NO: 2766 - protein, 42 aa, Artificial Sequence
  chemically synthesized
SQVSPFKIPVEELEDRVFVNCNTSIYKASSLSNCRHTSSVEE

SEQ ID NO: 2767 - protein, 42 aa, Artificial Sequence
  chemically synthesized
SQVSPFKIPFEELEDRVFVNCNTSIYKASSLSNCRHTSSVEE

SEQ ID NO: 2768 - protein, 42 aa, Artificial Sequence
  chemically synthesized
SQVSPFKIPMEELEDRVFVNCNTSIYKASSLSNCRHTSSVEE

SEQ ID NO: 2769 - protein, 42 aa, Artificial Sequence; identical to SEQ ID NO: 1034
  chemically synthesized

SEQ ID NO: 2770 - protein, 42 aa, Artificial Sequence
  chemically synthesized
  misc_feature (11)..(11): Xaa can be a proteinogenic, non-proteinogenic or synthetic amino acid like ornithin or selenocystein
SQVSPFKIPIXELEDRVFVNCNTSIYKASSLSNCRHTSSVEE

SEQ ID NO: 2771 - protein, 42 aa, Artificial Sequence; identical to SEQ ID NO: 1154
  chemically synthesized

SEQ ID NO: 2772 - protein, 42 aa, Artificial Sequence
  chemically synthesized
  misc_feature (12)..(12): Xaa can be a proteinogenic, non-proteinogenic or synthetic amino acid like ornithin or selenocystein
SQVSPFKIPIEXLEDRVFVNCNTSIYKASSLSNCRHTSSVEE

SEQ ID NO: 2773 - protein, 42 aa, Artificial Sequence
  chemically synthesized
SQVSPFKIPIEEVEDRVFVNCNTSIYKASSLSNCRHTSSVEE

SEQ ID NO: 2774 - protein, 42 aa, Artificial Sequence; identical to SEQ ID NO: 1271
  chemically synthesized

SEQ ID NO: 2775 - protein, 42 aa, Artificial Sequence
  chemically synthesized
SQVSPFKIPIEEFEDRVFVNCNTSIYKASSLSNCRHTSSVEE

SEQ ID NO: 2776 - protein, 42 aa, Artificial Sequence
  chemically synthesized
SQVSPFKIPIEEHEDRVFVNCNTSIYKASSLSNCRHTSSVEE

SEQ ID NO: 2777 - protein, 42 aa, Artificial Sequence
  chemically synthesized
SQVSPFKIPIEEMEDRVFVNCNTSIYKASSLSNCRHTSSVEE

SEQ ID NO: 2778 - protein, 42 aa, Artificial Sequence; identical to SEQ ID NO: 1391
  chemically synthesized

SEQ ID NO: 2779 - protein, 42 aa, Artificial Sequence
  chemically synthesized
  misc_feature (14)..(14): Xaa can be a proteinogenic, non-proteinogenic or synthetic amino acid like ornithin or selenocystein
SQVSPFKIPIEELXDRVFVNCNTSIYKASSLSNCRHTSSVEE

SEQ ID NO: 2780 - protein, 42 aa, Artificial Sequence
  chemically synthesized
  misc_feature (15)..(15): Xaa can be a proteinogenic, non-proteinogenic or synthetic amino acid like ornithin or selenocystein
SQVSPFKIPIEELEXRVFVNCNTSIYKASSLSNCRHTSSVEE

SEQ ID NO: 2781 - protein, 42 aa, Artificial Sequence
  chemically synthesized
SQVSPFKIPIEELEERVFVNCNTSIYKASSLSNCRHTSSVEE

SEQ ID NO: 2782 - protein, 42 aa, Artificial Sequence; identical to SEQ ID NO: 1510
  chemically synthesized

SEQ ID NO: 2783 - protein, 42 aa, Artificial Sequence
  chemically synthesized
SQVSPFKIPIEELEDHVFVNCNTSIYKASSLSNCRHTSSVEE

SEQ ID NO: 2784 - protein, 42 aa, Artificial Sequence
  chemically synthesized
  misc_feature (16)..(16): Xaa can be a proteinogenic, non-proteinogenic or synthetic amino acid like ornithin or selenocystein
SQVSPFKIPIEELEDXVFVNCNTSIYKASSLSNCRHTSSVEE

SEQ ID NO: 2785 - protein, 42 aa, Artificial Sequence; identical to SEQ ID NO: 1627
  chemically synthesized

SEQ ID NO: 2786 - protein, 42 aa, Artificial Sequence
  chemically synthesized
SQVSPFKIPIEELEDRLFVNCNTSIYKASSLSNCRHTSSVEE

SEQ ID NO: 2787 - protein, 42 aa, Artificial Sequence
  chemically synthesized
SQVSPFKIPIEELEDRFFVNCNTSIYKASSLSNCRHTSSVEE

SEQ ID NO: 2788 - protein, 42 aa, Artificial Sequence
  chemically synthesized
SQVSPFKIPIEELEDRHFVNCNTSIYKASSLSNCRHTSSVEE

SEQ ID NO: 2789 - protein, 42 aa, Artificial Sequence
  chemically synthesized
SQVSPFKIPIEELEDRMFVNCNTSIYKASSLSNCRHTSSVEE

SEQ ID NO: 2790 - protein, 42 aa, Artificial Sequence; identical to SEQ ID NO: 1744
  chemically synthesized

SEQ ID NO: 2791 - protein, 42 aa, Artificial Sequence
  chemically synthesized
SQVSPFKIPIEELEDRVLVNCNTSIYKASSLSNCRHTSSVEE

SEQ ID NO: 2792 - protein, 42 aa, Artificial Sequence
  chemically synthesized
SQVSPFKIPIEELEDRVVVNCNTSIYKASSLSNCRHTSSVEE

SEQ ID NO: 2793 - protein, 42 aa, Artificial Sequence
  chemically synthesized
SQVSPFKIPIEELEDRVHVNCNTSIYKASSLSNCRHTSSVEE

SEQ ID NO: 2794 - protein, 42 aa, Artificial Sequence
  chemically synthesized
SQVSPFKIPIEELEDRVMVNCNTSIYKASSLSNCRHTSSVEE

SEQ ID NO: 2795 - protein, 42 aa, Artificial Sequence; identical to SEQ ID NO: 1861
  chemically synthesized

SEQ ID NO: 2796 - protein, 42 aa, Artificial Sequence
  chemically synthesized
SQVSPFKIPIEELEDRVFLNCNTSIYKASSLSNCRHTSSVEE

SEQ ID NO: 2797 - protein, 42 aa, Artificial Sequence
  chemically synthesized
SQVSPFKIPIEELEDRVFFNCNTSIYKASSLSNCRHTSSVEE

SEQ ID NO: 2798 - protein, 42 aa, Artificial Sequence
  chemically synthesized
SQVSPFKIPIEELEDRVFHNCNTSIYKASSLSNCRHTSSVEE

SEQ ID NO: 2799 - protein, 42 aa, Artificial Sequence
  chemically synthesized
SQVSPFKIPIEELEDRVFMNCNTSIYKASSLSNCRHTSSVEE

SEQ ID NO: 2800 - protein, 42 aa, Artificial Sequence; identical to SEQ ID NO: 1982
  chemically synthesized

SEQ ID NO: 2801 - protein, 42 aa, Artificial Sequence
  chemically synthesized
SQVSPFKIPIEELEDRVFVNSNTSIYKASSLSNCRHTSSVEE

SEQ ID NO: 2802 - protein, 42 aa, Artificial Sequence
  chemically synthesized
SQVSPFKIPIEELEDRVFVNGNTSIYKASSLSNCRHTSSVEE

SEQ ID NO: 2803 - protein, 42 aa, Artificial Sequence
  chemically synthesized
SQVSPFKIPIEELEDRVFVNANTSIYKASSLSNCRHTSSVEE

SEQ ID NO: 2804 - protein, 42 aa, Artificial Sequence; identical to SEQ ID NO: 2223
  chemically synthesized

SEQ ID NO: 2805 - protein, 42 aa, Artificial Sequence; identical to SEQ ID NO: 2343
  chemically synthesized

SEQ ID NO: 2806 - protein, 42 aa, Artificial Sequence
  chemically synthesized
SQVSPFKIPIEELEDRVFVNCNYSIYKASSLSNCRHTSSVEE

SEQ ID NO: 2807 - protein, 42 aa, Artificial Sequence; identical to SEQ ID NO: 2463
  chemically synthesized

SEQ ID NO: 2808 - protein, 42 aa, Artificial Sequence
  chemically synthesized
SQVSPFKIPIEELEDRVFVNCNTYIYKASSLSNCRHTSSVEE

SEQ ID NO: 2809 - protein, 42 aa, Artificial Sequence
  chemically synthesized
SQVSPFKIPIEELEDRVFVNCNTSVYKASSLSNCRHTSSVEE

SEQ ID NO: 2810 - protein, 42 aa, Artificial Sequence; identical to SEQ ID NO: 2580
  chemically synthesized

SEQ ID NO: 2811 - protein, 42 aa, Artificial Sequence
  chemically synthesized
SQVSPFKIPIEELEDRVFVNCNTSHYKASSLSNCRHTSSVEE

SEQ ID NO: 2812 - protein, 42 aa, Artificial Sequence
  chemically synthesized
SQVSPFKIPIEELEDRVFVNCNTSFYKASSLSNCRHTSSVEE

SEQ ID NO: 2813 - protein, 42 aa, Artificial Sequence
  chemically synthesized
SQVSPFKIPIEELEDRVFVNCNTSMYKASSLSNCRHTSSVEE

SEQ ID NO: 2814 - protein, 42 aa, Artificial Sequence
  chemically synthesized
SQVSPFKIPIEELEDRVFVNCNTSIWKASSLSNCRHTSSVEE

SEQ ID NO: 2815 - protein, 42 aa, Artificial Sequence
  chemically synthesized
SQVSPFKIPIEELEDRVFVNCNTSIFKASSLSNCRHTSSVEE

SEQ ID NO: 2816 - protein, 42 aa, Artificial Sequence
  chemically synthesized
SQVSPFKIPIEELEDRVFVNCNTSISKASSLSNCRHTSSVEE

SEQ ID NO: 2817 - protein, 42 aa, Artificial Sequence; identical to SEQ ID NO: 2698
  chemically synthesized

SEQ ID NO: 2818 - protein, 42 aa, Artificial Sequence
  chemically synthesized
SQVSPFKIPIEELEDRVFVNCNTSIYKGSSLSNCRHTSSVEE

SEQ ID NO: 2819 - protein, 42 aa, Artificial Sequence
  chemically synthesized
SQVSPFKIPIEELEDRVFVNCNTSIYKATSLSNCRHTSSVEE

SEQ ID NO: 2820 - protein, 42 aa, Artificial Sequence
  chemically synthesized
SQVSPFKIPIEELEDRVFVNCNTSIYKAYSLSNCRHTSSVEE

SEQ ID NO: 2821 - protein, 42 aa, Artificial Sequence
  chemically synthesized
SQVSPFKIPIEELEDRVFVNCNTSIYKASTLSNCRHTSSVEE

SEQ ID NO: 2822 - protein, 42 aa, Artificial Sequence
  chemically synthesized
SQVSPFKIPIEELEDRVFVNCNTSIYKASYLSNCRHTSSVEE

SEQ ID NO: 2823 - protein, 42 aa, Artificial Sequence
  chemically synthesized
SQVSPFKIPIEELEDRVFVNCNTSIYKASSISNCRHTSSVEE

SEQ ID NO: 2824 - protein, 42 aa, Artificial Sequence
  chemically synthesized
SQVSPFKIPIEELEDRVFVNCNTSIYKASSVSNCRHTSSVEE

SEQ ID NO: 2825 - protein, 42 aa, Artificial Sequence
  chemically synthesized
SQVSPFKIPIEELEDRVFVNCNTSIYKASSFSNCRHTSSVEE

SEQ ID NO: 2826 - protein, 42 aa, Artificial Sequence
  chemically synthesized
SQVSPFKIPIEELEDRVFVNCNTSIYKASSMSNCRHTSSVEE

SEQ ID NO: 2827 - protein, 42 aa, Artificial Sequence
  chemically synthesized
SQVSPFKIPIEELEDRVFVNCNTSIYKASSHSNCRHTSSVEE

SEQ ID NO: 2828 - protein, 42 aa, Artificial Sequence
  chemically synthesized
SQVSPFKIPIEELEDRVFVNCNTSIYKASSLTNCRHTSSVEE

SEQ ID NO: 2829 - protein, 42 aa, Artificial Sequence
  chemically synthesized
SQVSPFKIPIEELEDRVFVNCNTSIYKASSLYNCRHTSSVEE

SEQ ID NO: 2830 - protein, 42 aa, Artificial Sequence
  chemically synthesized
SQVSPFKIPIEELEDRVFVNCNTSIYKASSLSQCRHTSSVEE

SEQ ID NO: 2831 - protein, 42 aa, Artificial Sequence
  chemically synthesized
SQVSPFKIPIEELEDRVFVNCNTSIYKASSLSNSRHTSSVEE

SEQ ID NO: 2832 - protein, 42 aa, Artificial Sequence
  chemically synthesized
SQVSPFKIPIEELEDRVFVNCNTSIYKASSLSNGRHTSSVEE

SEQ ID NO: 2833 - protein, 42 aa, Artificial Sequence
  chemically synthesized
SQVSPFKIPIEELEDRVFVNCNTSIYKASSLSNARHTSSVEE

SEQ ID NO: 2834 - protein, 42 aa, Artificial Sequence
  chemically synthesized
  misc_feature (35)..(35): Xaa can be a proteinogenic, non-proteinogenic or synthetic amino acid like ornithin or selenocystein
SQVSPFKIPIEELEDRVFVNCNTSIYKASSLSNCXHTSSVEE

SEQ ID NO: 2835 - protein, 42 aa, Artificial Sequence
  chemically synthesized
SQVSPFKIPIEELEDRVFVNCNTSIYKASSLSNCHHTSSVEE

SEQ ID NO: 2836 - protein, 42 aa, Artificial Sequence
  chemically synthesized
SQVSPFKIPIEELEDRVFVNCNTSIYKASSLSNCKHTSSVEE

SEQ ID NO: 2837 - protein, 42 aa, Artificial Sequence
  chemically synthesized
SQVSPFKIPIEELEDRVFVNCNTSIYKASSLSNCRGTSSVEE

SEQ ID NO: 2838 - protein, 42 aa, Artificial Sequence
  chemically synthesized
SQVSPFKIPIEELEDRVFVNCNTSIYKASSLSNCRATSSVEE

SEQ ID NO: 2839 - protein, 42 aa, Artificial Sequence
  chemically synthesized
SQVSPFKIPIEELEDRVFVNCNTSIYKASSLSNCRITSSVEE

SEQ ID NO: 2840 - protein, 42 aa, Artificial Sequence
  chemically synthesized
SQVSPFKIPIEELEDRVFVNCNTSIYKASSLSNCRLTSSVEE

SEQ ID NO: 2841 - protein, 42 aa, Artificial Sequence
  chemically synthesized
SQVSPFKIPIEELEDRVFVNCNTSIYKASSLSNCRMTSSVEE

SEQ ID NO: 2842 - protein, 42 aa, Artificial Sequence
  chemically synthesized
SQVSPFKIPIEELEDRVFVNCNTSIYKASSLSNCRVTSSVEE

SEQ ID NO: 2843 - protein, 42 aa, Artificial Sequence
  chemically synthesized
SQVSPFKIPIEELEDRVFVNCNTSIYKASSLSNCRHSSSVEE

SEQ ID NO: 2844 - protein, 42 aa, Artificial Sequence
  chemically synthesized
SQVSPFKIPIEELEDRVFVNCNTSIYKASSLSNCRHYSSVEE

SEQ ID NO: 2845 - protein, 42 aa, Artificial Sequence
  chemically synthesized
SQVSPFKIPIEELEDRVFVNCNTSIYKASSLSNCRHTTSVEE

SEQ ID NO: 2846 - protein, 42 aa, Artificial Sequence
  chemically synthesized
SQVSPFKIPIEELEDRVFVNCNTSIYKASSLSNCRHTYSVEE

SEQ ID NO: 2847 - protein, 42 aa, Artificial Sequence
  chemically synthesized
SQVSPFKIPIEELEDRVFVNCNTSIYKASSLSNCRHTSTVEE

SEQ ID NO: 2848 - protein, 42 aa, Artificial Sequence
  chemically synthesized
SQVSPFKIPIEELEDRVFVNCNTSIYKASSLSNCRHTSYVEE

SEQ ID NO: 2849 - protein, 42 aa, Artificial Sequence
  chemically synthesized
SQVSPFKIPIEELEDRVFVNCNTSIYKASSLSNCRHTSSIEE

SEQ ID NO: 2850 - protein, 42 aa, Artificial Sequence
  chemically synthesized
SQVSPFKIPIEELEDRVFVNCNTSIYKASSLSNCRHTSSLEE

SEQ ID NO: 2851 - protein, 42 aa, Artificial Sequence
  chemically synthesized
SQVSPFKIPIEELEDRVFVNCNTSIYKASSLSNCRHTSSFEE

SEQ ID NO: 2852 - protein, 42 aa, Artificial Sequence
  chemically synthesized
SQVSPFKIPIEELEDRVFVNCNTSIYKASSLSNCRHTSSHEE

SEQ ID NO: 2853 - protein, 42 aa, Artificial Sequence
  chemically synthesized
SQVSPFKIPIEELEDRVFVNCNTSIYKASSLSNCRHTSSMEE

SEQ ID NO: 2854 - protein, 42 aa, Artificial Sequence
  chemically synthesized
SQVSPFKIPIEELEDRVFVNCNTSIYKASSLSNCRHTSSVDE

SEQ ID NO: 2855 - protein, 42 aa, Artificial Sequence
  chemically synthesized
  misc_feature (41)..(41): Xaa can be a proteinogenic, non-proteinogenic or synthetic amino acid like ornithin or selenocystein
SQVSPFKIPIEELEDRVFVNCNTSIYKASSLSNCRHTSSVXE

SEQ ID NO: 2856 - protein, 42 aa, Artificial Sequence
  chemically synthesized
SQVSPFKIPIEELEDRVFVNCNTSIYKASSLSNCRHTSSVED

SEQ ID NO: 2857 - protein, 42 aa, Artificial Sequence
  chemically synthesized
  misc_feature (42)..(42): Xaa can be a proteinogenic, non-proteinogenic or synthetic amino acid like ornithin or selenocystein
SQVSPFKIPIEELEDRVFVNCNTSIYKASSLSNCRHTSSVEX

SEQ ID NO: 2858 - protein, 42 aa, Artificial Sequence
  chemically synthesized
SQVSAFKIPIEELEDRVFVNCNTSIYKASSLSNCRHTSSVEE

SEQ ID NO: 2859 - protein, 42 aa, Artificial Sequence
  chemically synthesized
SQVSGFKIPIEELEDRVFVNCNTSIYKASSLSNCRHTSSVEE

SEQ ID NO: 2860 - protein, 42 aa, Artificial Sequence
  chemically synthesized
SQVSPFKIAIEELEDRVFVNCNTSIYKASSLSNCRHTSSVEE

SEQ ID NO: 2861 - protein, 42 aa, Artificial Sequence
  chemically synthesized
SQVSPFKIGIEELEDRVFVNCNTSIYKASSLSNCRHTSSVEE

SEQ ID NO: 2862 - protein, 42 aa, Artificial Sequence; identical to SEQ ID NO: 82
  chemically synthesized

SEQ ID NO: 2863 - protein, 42 aa, Artificial Sequence; identical to SEQ ID NO: 201
  chemically synthesized

SEQ ID NO: 2864 - protein, 42 aa, Artificial Sequence
  chemically synthesized
YQVSPFKIPIEELEDRVFVNCNTSIYRGSSLSNCRHTSSVEE

SEQ ID NO: 2865 - protein, 42 aa, Artificial Sequence; identical to SEQ ID NO: 321
  chemically synthesized

SEQ ID NO: 2866 - protein, 42 aa, Artificial Sequence; identical to SEQ ID NO: 439
  chemically synthesized

SEQ ID NO: 2867 - protein, 42 aa, Artificial Sequence
  chemically synthesized
SQISPFKIPIEELEDRVFVNCNTSIYRGSSLSNCRHTSSVEE

SEQ ID NO: 2868 - protein, 42 aa, Artificial Sequence
  chemically synthesized
SQPSPFKIPIEELEDRVFVNCNTSIYRGSSLSNCRHTSSVEE

SEQ ID NO: 2869 - protein, 42 aa, Artificial Sequence
  chemically synthesized
SQFSPFKIPIEELEDRVFVNCNTSIYRGSSLSNCRHTSSVEE

SEQ ID NO: 2870 - protein, 42 aa, Artificial Sequence; identical to SEQ ID NO: 558
  chemically synthesized

SEQ ID NO: 2871 - protein, 42 aa, Artificial Sequence
  chemically synthesized
SQVYPFKIPIEELEDRVFVNCNTSIYRGSSLSNCRHTSSVEE

SEQ ID NO: 2872 - protein, 42 aa, Artificial Sequence
  chemically synthesized
SQVSPWKIPIEELEDRVFVNCNTSIYRGSSLSNCRHTSSVEE

SEQ ID NO: 2873 - protein, 42 aa, Artificial Sequence
  chemically synthesized
SQVSPYKIPIEELEDRVFVNCNTSIYRGSSLSNCRHTSSVEE

SEQ ID NO: 2874 - protein, 42 aa, Artificial Sequence
  chemically synthesized
SQVSPHKIPIEELEDRVFVNCNTSIYRGSSLSNCRHTSSVEE

SEQ ID NO: 2875 - protein, 42 aa, Artificial Sequence
  chemically synthesized
SQVSPFRIPIEELEDRVFVNCNTSIYRGSSLSNCRHTSSVEE

SEQ ID NO: 2876 - protein, 42 aa, Artificial Sequence
  chemically synthesized
SQVSPFHIPIEELEDRVFVNCNTSIYRGSSLSNCRHTSSVEE

SEQ ID NO: 2877 - protein, 42 aa, Artificial Sequence
  chemically synthesized
  misc_feature (7)..(7): Xaa can be a proteinogenic, non-proteinogenic or synthetic amino acid like ornithin or selenocystein
SQVSPFXIPIEELEDRVFVNCNTSIYRGSSLSNCRHTSSVEE

SEQ ID NO: 2878 - protein, 42 aa, Artificial Sequence; identical to SEQ ID NO: 797
  chemically synthesized

SEQ ID NO: 2879 - protein, 42 aa, Artificial Sequence
  chemically synthesized
SQVSPFKHPIEELEDRVFVNCNTSIYRGSSLSNCRHTSSVEE

SEQ ID NO: 2880 - protein, 42 aa, Artificial Sequence
  chemically synthesized
SQVSPFKVPIEELEDRVFVNCNTSIYRGSSLSNCRHTSSVEE

SEQ ID NO: 2881 - protein, 42 aa, Artificial Sequence
  chemically synthesized
SQVSPFKFPIEELEDRVFVNCNTSIYRGSSLSNCRHTSSVEE

SEQ ID NO: 2882 - protein, 42 aa, Artificial Sequence
  chemically synthesized
SQVSPFKMPIEELEDRVFVNCNTSIYRGSSLSNCRHTSSVEE

SEQ ID NO: 2883 - protein, 42 aa, Artificial Sequence; identical to SEQ ID NO: 915
  chemically synthesized

SEQ ID NO: 2884 - protein, 42 aa, Artificial Sequence
  chemically synthesized
SQVSPFKIPHEELEDRVFVNCNTSIYRGSSLSNCRHTSSVEE

SEQ ID NO: 2885 - protein, 42 aa, Artificial Sequence
  chemically synthesized
SQVSPFKIPVEELEDRVFVNCNTSIYRGSSLSNCRHTSSVEE

SEQ ID NO: 2886 - protein, 42 aa, Artificial Sequence
  chemically synthesized
SQVSPFKIPFEELEDRVFVNCNTSIYRGSSLSNCRHTSSVEE

SEQ ID NO: 2887 - protein, 42 aa, Artificial Sequence
  chemically synthesized
SQVSPFKIPMEELEDRVFVNCNTSIYRGSSLSNCRHTSSVEE

SEQ ID NO: 2888 - protein, 42 aa, Artificial Sequence; identical to SEQ ID NO: 1035
  chemically synthesized

SEQ ID NO: 2889 - protein, 42 aa, Artificial Sequence
  chemically synthesized
  misc_feature (11)..(11): Xaa can be a proteinogenic, non-proteinogenic or synthetic amino acid like ornithin or selenocystein
SQVSPFKIPIXELEDRVFVNCNTSIYRGSSLSNCRHTSSVEE

SEQ ID NO: 2890 - protein, 42 aa, Artificial Sequence; identical to SEQ ID NO: 1155
  chemically synthesized

SEQ ID NO: 2891 - protein, 42 aa, Artificial Sequence
  chemically synthesized
  misc_feature (12)..(12): Xaa can be a proteinogenic, non-proteinogenic or synthetic amino acid like ornithin or selenocystein
SQVSPFKIPIEXLEDRVFVNCNTSIYRGSSLSNCRHTSSVEE

SEQ ID NO: 2892 - protein, 42 aa, Artificial Sequence
  chemically synthesized
SQVSPFKIPIEEVEDRVFVNCNTSIYRGSSLSNCRHTSSVEE

SEQ ID NO: 2893 - protein, 42 aa, Artificial Sequence; identical to SEQ ID NO: 1272
  chemically synthesized

SEQ ID NO: 2894 - protein, 42 aa, Artificial Sequence
  chemically synthesized
SQVSPFKIPIEEFEDRVFVNCNTSIYRGSSLSNCRHTSSVEE

SEQ ID NO: 2895 - protein, 42 aa, Artificial Sequence
  chemically synthesized
SQVSPFKIPIEEHEDRVFVNCNTSIYRGSSLSNCRHTSSVEE

SEQ ID NO: 2896 - protein, 42 aa, Artificial Sequence
  chemically synthesized
SQVSPFKIPIEEMEDRVFVNCNTSIYRGSSLSNCRHTSSVEE

SEQ ID NO: 2897 - protein, 42 aa, Artificial Sequence; identical to SEQ ID NO: 1392
  chemically synthesized

SEQ ID NO: 2898 - protein, 42 aa, Artificial Sequence
  chemically synthesized
  misc_feature (14)..(14): Xaa can be a proteinogenic, non-proteinogenic or synthetic amino acid like ornithin or selenocystein
SQVSPFKIPIEELXDRVFVNCNTSIYRGSSLSNCRHTSSVEE

SEQ ID NO: 2899 - protein, 42 aa, Artificial Sequence
  chemically synthesized
  misc_feature (15)..(15): Xaa can be a proteinogenic, non-proteinogenic or synthetic amino acid like ornithin or selenocystein
SQVSPFKIPIEELEXRVFVNCNTSIYRGSSLSNCRHTSSVEE

SEQ ID NO: 2900 - protein, 42 aa, Artificial Sequence
  chemically synthesized
SQVSPFKIPIEELEERVFVNCNTSIYRGSSLSNCRHTSSVEE

SEQ ID NO: 2901 - protein, 42 aa, Artificial Sequence; identical to SEQ ID NO: 1511
  chemically synthesized

SEQ ID NO: 2902 - protein, 42 aa, Artificial Sequence
  chemically synthesized
SQVSPFKIPIEELEDHVFVNCNTSIYRGSSLSNCRHTSSVEE

SEQ ID NO: 2903 - protein, 42 aa, Artificial Sequence
  chemically synthesized
  misc_feature (16)..(16): Xaa can be a proteinogenic, non-proteinogenic or synthetic amino acid like ornithin or selenocystein
SQVSPFKIPIEELEDXVFVNCNTSIYRGSSLSNCRHTSSVEE

SEQ ID NO: 2904 - protein, 42 aa, Artificial Sequence; identical to SEQ ID NO: 1628
  chemically synthesized

SEQ ID NO: 2905 - protein, 42 aa, Artificial Sequence
  chemically synthesized
SQVSPFKIPIEELEDRLFVNCNTSIYRGSSLSNCRHTSSVEE

SEQ ID NO: 2906 - protein, 42 aa, Artificial Sequence
  chemically synthesized
SQVSPFKIPIEELEDRFFVNCNTSIYRGSSLSNCRHTSSVEE

SEQ ID NO: 2907 - protein, 42 aa, Artificial Sequence
  chemically synthesized
SQVSPFKIPIEELEDRHFVNCNTSIYRGSSLSNCRHTSSVEE

SEQ ID NO: 2908 - protein, 42 aa, Artificial Sequence
  chemically synthesized
SQVSPFKIPIEELEDRMFVNCNTSIYRGSSLSNCRHTSSVEE

SEQ ID NO: 2909 - protein, 42 aa, Artificial Sequence; identical to SEQ ID NO: 1745
  chemically synthesized

SEQ ID NO: 2910 - protein, 42 aa, Artificial Sequence
  chemically synthesized
SQVSPFKIPIEELEDRVLVNCNTSIYRGSSLSNCRHTSSVEE

SEQ ID NO: 2911 - protein, 42 aa, Artificial Sequence
  chemically synthesized
SQVSPFKIPIEELEDRVVVNCNTSIYRGSSLSNCRHTSSVEE

SEQ ID NO: 2912 - protein, 42 aa, Artificial Sequence
  chemically synthesized
SQVSPFKIPIEELEDRVHVNCNTSIYRGSSLSNCRHTSSVEE

SEQ ID NO: 2913 - protein, 42 aa, Artificial Sequence
  chemically synthesized
SQVSPFKIPIEELEDRVMVNCNTSIYRGSSLSNCRHTSSVEE

SEQ ID NO: 2914 - protein, 42 aa, Artificial Sequence; identical to SEQ ID NO: 1862
  chemically synthesized

SEQ ID NO: 2915 - protein, 42 aa, Artificial Sequence
  chemically synthesized
SQVSPFKIPIEELEDRVFLNCNTSIYRGSSLSNCRHTSSVEE

SEQ ID NO: 2916 - protein, 42 aa, Artificial Sequence
  chemically synthesized
SQVSPFKIPIEELEDRVFFNCNTSIYRGSSLSNCRHTSSVEE

SEQ ID NO: 2917 - protein, 42 aa, Artificial Sequence
  chemically synthesized
SQVSPFKIPIEELEDRVFHNCNTSIYRGSSLSNCRHTSSVEE

SEQ ID NO: 2918 - protein, 42 aa, Artificial Sequence
  chemically synthesized
SQVSPFKIPIEELEDRVFMNCNTSIYRGSSLSNCRHTSSVEE

SEQ ID NO: 2919 - protein, 42 aa, Artificial Sequence; identical to SEQ ID NO: 1983
  chemically synthesized

SEQ ID NO: 2920 - protein, 42 aa, Artificial Sequence
  chemically synthesized
SQVSPFKIPIEELEDRVFVNSNTSIYRGSSLSNCRHTSSVEE

SEQ ID NO: 2921 - protein, 42 aa, Artificial Sequence
  chemically synthesized
SQVSPFKIPIEELEDRVFVNGNTSIYRGSSLSNCRHTSSVEE

SEQ ID NO: 2922 - protein, 42 aa, Artificial Sequence; identical to SEQ ID NO: 2921
  chemically synthesized

SEQ ID NO: 2923 - protein, 42 aa, Artificial Sequence; identical to SEQ ID NO: 2224
  chemically synthesized

SEQ ID NO: 2924 - protein, 42 aa, Artificial Sequence; identical to SEQ ID NO: 2344
  chemically synthesized

SEQ ID NO: 2925 - protein, 42 aa, Artificial Sequence
  chemically synthesized
SQVSPFKIPIEELEDRVFVNCNYSIYRGSSLSNCRHTSSVEE

SEQ ID NO: 2926 - protein, 42 aa, Artificial Sequence; identical to SEQ ID NO: 2464
  chemically synthesized

SEQ ID NO: 2927 - protein, 42 aa, Artificial Sequence
  chemically synthesized
SQVSPFKIPIEELEDRVFVNCNTYIYRGSSLSNCRHTSSVEE

SEQ ID NO: 2928 - protein, 42 aa, Artificial Sequence
  chemically synthesized
SQVSPFKIPIEELEDRVFVNCNTSVYRGSSLSNCRHTSSVEE

SEQ ID NO: 2929 - protein, 42 aa, Artificial Sequence; identical to SEQ ID NO: 2581
  chemically synthesized

SEQ ID NO: 2930 - protein, 42 aa, Artificial Sequence
  chemically synthesized
SQVSPFKIPIEELEDRVFVNCNTSHYRGSSLSNCRHTSSVEE

SEQ ID NO: 2931 - protein, 42 aa, Artificial Sequence
  chemically synthesized
SQVSPFKIPIEELEDRVFVNCNTSFYRGSSLSNCRHTSSVEE

SEQ ID NO: 2932 - protein, 42 aa, Artificial Sequence
  chemically synthesized
SQVSPFKIPIEELEDRVFVNCNTSMYRGSSLSNCRHTSSVEE

SEQ ID NO: 2933 - protein, 42 aa, Artificial Sequence
  chemically synthesized
SQVSPFKIPIEELEDRVFVNCNTSIWRGSSLSNCRHTSSVEE

SEQ ID NO: 2934 - protein, 42 aa, Artificial Sequence
  chemically synthesized
SQVSPFKIPIEELEDRVFVNCNTSIFRGSSLSNCRHTSSVEE

SEQ ID NO: 2935 - protein, 42 aa, Artificial Sequence
  chemically synthesized
SQVSPFKIPIEELEDRVFVNCNTSISRGSSLSNCRHTSSVEE

SEQ ID NO: 2936 - protein, 42 aa, Artificial Sequence; identical to SEQ ID NO: 2699
  chemically synthesized

SEQ ID NO: 2937 - protein, 42 aa, Artificial Sequence
  chemically synthesized
  misc_feature (27)..(27): Xaa can be a proteinogenic, non-proteinogenic or synthetic amino acid like ornithin or selenocystein
SQVSPFKIPIEELEDRVFVNCNTSIYXGSSLSNCRHTSSVEE

SEQ ID NO: 2938 - protein, 42 aa, Artificial Sequence
  chemically synthesized
SQVSPFKIPIEELEDRVFVNCNTSIYHGSSLSNCRHTSSVEE

SEQ ID NO: 2939 - protein, 42 aa, Artificial Sequence; identical to SEQ ID NO: 2818
  chemically synthesized

SEQ ID NO: 2940 - protein, 42 aa, Artificial Sequence
  chemically synthesized
SQVSPFKIPIEELEDRVFVNCNTSIYRGTSLSNCRHTSSVEE

SEQ ID NO: 2941 - protein, 42 aa, Artificial Sequence
  chemically synthesized
SQVSPFKIPIEELEDRVFVNCNTSIYRGYSLSNCRHTSSVEE

SEQ ID NO: 2942 - protein, 42 aa, Artificial Sequence
  chemically synthesized
SQVSPFKIPIEELEDRVFVNCNTSIYRGSTLSNCRHTSSVEE

SEQ ID NO: 2943 - protein, 42 aa, Artificial Sequence
  chemically synthesized
SQVSPFKIPIEELEDRVFVNCNTSIYRGSYLSNCRHTSSVEE

SEQ ID NO: 2944 - protein, 42 aa, Artificial Sequence
  chemically synthesized
SQVSPFKIPIEELEDRVFVNCNTSIYRGSSISNCRHTSSVEE

SEQ ID NO: 2945 - protein, 42 aa, Artificial Sequence
  chemically synthesized
SQVSPFKIPIEELEDRVFVNCNTSIYRGSSVSNCRHTSSVEE

SEQ ID NO: 2946 - protein, 42 aa, Artificial Sequence
  chemically synthesized
SQVSPFKIPIEELEDRVFVNCNTSIYRGSSFSNCRHTSSVEE

SEQ ID NO: 2947 - protein, 42 aa, Artificial Sequence
  chemically synthesized
SQVSPFKIPIEELEDRVFVNCNTSIYRGSSMSNCRHTSSVEE

SEQ ID NO: 2948 - protein, 42 aa, Artificial Sequence
  chemically synthesized
SQVSPFKIPIEELEDRVFVNCNTSIYRGSSHSNCRHTSSVEE

SEQ ID NO: 2949 - protein, 42 aa, Artificial Sequence
  chemically synthesized
SQVSPFKIPIEELEDRVFVNCNTSIYRGSSLTNCRHTSSVEE

SEQ ID NO: 2950 - protein, 42 aa, Artificial Sequence
  chemically synthesized
SQVSPFKIPIEELEDRVFVNCNTSIYRGSSLYNCRHTSSVEE

SEQ ID NO: 2951 - protein, 42 aa, Artificial Sequence
  chemically synthesized
SQVSPFKIPIEELEDRVFVNCNTSIYRGSSLSQCRHTSSVEE

SEQ ID NO: 2952 - protein, 42 aa, Artificial Sequence
  chemically synthesized
SQVSPFKIPIEELEDRVFVNCNTSIYRGSSLSNSRHTSSVEE

SEQ ID NO: 2953 - protein, 42 aa, Artificial Sequence
  chemically synthesized
SQVSPFKIPIEELEDRVFVNCNTSIYRGSSLSNGRHTSSVEE

SEQ ID NO: 2954 - protein, 42 aa, Artificial Sequence; identical to SEQ ID NO: 2953
  chemically synthesized

SEQ ID NO: 2955 - protein, 42 aa, Artificial Sequence
  chemically synthesized
  misc_feature (35)..(35): Xaa can be a proteinogenic, non-proteinogenic or synthetic amino acid like ornithin or selenocystein
SQVSPFKIPIEELEDRVFVNCNTSIYRGSSLSNCXHTSSVEE

SEQ ID NO: 2956 - protein, 42 aa, Artificial Sequence
  chemically synthesized
SQVSPFKIPIEELEDRVFVNCNTSIYRGSSLSNCHHTSSVEE

SEQ ID NO: 2957 - protein, 42 aa, Artificial Sequence
  chemically synthesized
SQVSPFKIPIEELEDRVFVNCNTSIYRGSSLSNCKHTSSVEE

SEQ ID NO: 2958 - protein, 42 aa, Artificial Sequence
  chemically synthesized
SQVSPFKIPIEELEDRVFVNCNTSIYRGSSLSNCRGTSSVEE

SEQ ID NO: 2959 - protein, 42 aa, Artificial Sequence; identical to SEQ ID NO: 2958
  chemically synthesized

SEQ ID NO: 2960 - protein, 42 aa, Artificial Sequence
  chemically synthesized
SQVSPFKIPIEELEDRVFVNCNTSIYRGSSLSNCRITSSVEE

SEQ ID NO: 2961 - protein, 42 aa, Artificial Sequence
  chemically synthesized
SQVSPFKIPIEELEDRVFVNCNTSIYRGSSLSNCRLTSSVEE

SEQ ID NO: 2962 - protein, 42 aa, Artificial Sequence
  chemically synthesized
SQVSPFKIPIEELEDRVFVNCNTSIYRGSSLSNCRMTSSVEE

SEQ ID NO: 2963 - protein, 42 aa, Artificial Sequence
  chemically synthesized
SQVSPFKIPIEELEDRVFVNCNTSIYRGSSLSNCRVTSSVEE

SEQ ID NO: 2964 - protein, 42 aa, Artificial Sequence
  chemically synthesized
SQVSPFKIPIEELEDRVFVNCNTSIYRGSSLSNCRHSSSVEE

SEQ ID NO: 2965 - protein, 42 aa, Artificial Sequence
  chemically synthesized
SQVSPFKIPIEELEDRVFVNCNTSIYRGSSLSNCRHYSSVEE

SEQ ID NO: 2966 - protein, 42 aa, Artificial Sequence
  chemically synthesized
SQVSPFKIPIEELEDRVFVNCNTSIYRGSSLSNCRHTTSVEE

SEQ ID NO: 2967 - protein, 42 aa, Artificial Sequence
  chemically synthesized
SQVSPFKIPIEELEDRVFVNCNTSIYRGSSLSNCRHTYSVEE

SEQ ID NO: 2968 - protein, 42 aa, Artificial Sequence
  chemically synthesized
SQVSPFKIPIEELEDRVFVNCNTSIYRGSSLSNCRHTSTVEE

SEQ ID NO: 2969 - protein, 42 aa, Artificial Sequence
  chemically synthesized
SQVSPFKIPIEELEDRVFVNCNTSIYRGSSLSNCRHTSYVEE

SEQ ID NO: 2970 - protein, 42 aa, Artificial Sequence
  chemically synthesized
SQVSPFKIPIEELEDRVFVNCNTSIYRGSSLSNCRHTSSIEE

SEQ ID NO: 2971 - protein, 42 aa, Artificial Sequence
  chemically synthesized
SQVSPFKIPIEELEDRVFVNCNTSIYRGSSLSNCRHTSSLEE

SEQ ID NO: 2972 - protein, 42 aa, Artificial Sequence
  chemically synthesized
SQVSPFKIPIEELEDRVFVNCNTSIYRGSSLSNCRHTSSFEE

SEQ ID NO: 2973 - protein, 42 aa, Artificial Sequence
  chemically synthesized
SQVSPFKIPIEELEDRVFVNCNTSIYRGSSLSNCRHTSSHEE

SEQ ID NO: 2974 - protein, 42 aa, Artificial Sequence
  chemically synthesized
SQVSPFKIPIEELEDRVFVNCNTSIYRGSSLSNCRHTSSMEE

SEQ ID NO: 2975 - protein, 42 aa, Artificial Sequence
  chemically synthesized
SQVSPFKIPIEELEDRVFVNCNTSIYRGSSLSNCRHTSSVDE

SEQ ID NO: 2976 - protein, 42 aa, Artificial Sequence
  chemically synthesized
  misc_feature (41)..(41): Xaa can be a proteinogenic, non-proteinogenic or synthetic amino acid like ornithin or selenocystein
SQVSPFKIPIEELEDRVFVNCNTSIYRGSSLSNCRHTSSVXE

SEQ ID NO: 2977 - protein, 42 aa, Artificial Sequence
  chemically synthesized
SQVSPFKIPIEELEDRVFVNCNTSIYRGSSLSNCRHTSSVED

SEQ ID NO: 2978 - protein, 42 aa, Artificial Sequence
  chemically synthesized
  misc_feature (42)..(42): Xaa can be a proteinogenic, non-proteinogenic or synthetic amino acid like ornithin or selenocystein
SQVSPFKIPIEELEDRVFVNCNTSIYRGSSLSNCRHTSSVEX

SEQ ID NO: 2979 - protein, 42 aa, Artificial Sequence
  chemically synthesized
SQVSGFKIPIEELEDRVFVNCNTSIYRGSSLSNCRHTSSVEE

SEQ ID NO: 2980 - protein, 42 aa, Artificial Sequence; identical to SEQ ID NO: 2979
  chemically synthesized

SEQ ID NO: 2981 - protein, 42 aa, Artificial Sequence
  chemically synthesized
SQVSPFKIGIEELEDRVFVNCNTSIYRGSSLSNCRHTSSVEE

SEQ ID NO: 2982 - protein, 42 aa, Artificial Sequence; identical to SEQ ID NO: 2981
  chemically synthesized

SEQ ID NO: 2983 - protein, 42 aa, Artificial Sequence; identical to SEQ ID NO: 83
  chemically synthesized

SEQ ID NO: 2984 - protein, 42 aa, Artificial Sequence; identical to SEQ ID NO: 202
  chemically synthesized

SEQ ID NO: 2985 - protein, 42 aa, Artificial Sequence
  chemically synthesized
YQVSPFKIPIEELEDRVFVNCNTSIYRATSLSNCRHTSSVEE

SEQ ID NO: 2986 - protein, 42 aa, Artificial Sequence; identical to SEQ ID NO: 322
  chemically synthesized

SEQ ID NO: 2987 - protein, 42 aa, Artificial Sequence; identical to SEQ ID NO: 440
  chemically synthesized

SEQ ID NO: 2988 - protein, 42 aa, Artificial Sequence
  chemically synthesized
SQISPFKIPIEELEDRVFVNCNTSIYRATSLSNCRHTSSVEE

SEQ ID NO: 2989 - protein, 42 aa, Artificial Sequence
  chemically synthesized
SQPSPFKIPIEELEDRVFVNCNTSIYRATSLSNCRHTSSVEE

SEQ ID NO: 2990 - protein, 42 aa, Artificial Sequence
  chemically synthesized
SQFSPFKIPIEELEDRVFVNCNTSIYRATSLSNCRHTSSVEE

SEQ ID NO: 2991 - protein, 42 aa, Artificial Sequence; identical to SEQ ID NO: 559
  chemically synthesized

SEQ ID NO: 2992 - protein, 42 aa, Artificial Sequence
  chemically synthesized
SQVYPFKIPIEELEDRVFVNCNTSIYRATSLSNCRHTSSVEE

SEQ ID NO: 2993 - protein, 42 aa, Artificial Sequence
  chemically synthesized
SQVSPWKIPIEELEDRVFVNCNTSIYRATSLSNCRHTSSVEE

SEQ ID NO: 2994 - protein, 42 aa, Artificial Sequence
  chemically synthesized
SQVSPYKIPIEELEDRVFVNCNTSIYRATSLSNCRHTSSVEE

SEQ ID NO: 2995 - protein, 42 aa, Artificial Sequence
  chemically synthesized
SQVSPHKIPIEELEDRVFVNCNTSIYRATSLSNCRHTSSVEE

SEQ ID NO: 2996 - protein, 42 aa, Artificial Sequence
  chemically synthesized
SQVSPFRIPIEELEDRVFVNCNTSIYRATSLSNCRHTSSVEE

SEQ ID NO: 2997 - protein, 42 aa, Artificial Sequence
  chemically synthesized
SQVSPFHIPIEELEDRVFVNCNTSIYRATSLSNCRHTSSVEE

SEQ ID NO: 2998 - protein, 42 aa, Artificial Sequence
  chemically synthesized
  misc_feature (7)..(7): Xaa can be a proteinogenic, non-proteinogenic or synthetic amino acid like ornithin or selenocystein
SQVSPFXIPIEELEDRVFVNCNTSIYRATSLSNCRHTSSVEE

SEQ ID NO: 2999 - protein, 42 aa, Artificial Sequence; identical to SEQ ID NO: 798
  chemically synthesized

SEQ ID NO: 3000 - protein, 42 aa, Artificial Sequence
  chemically synthesized
SQVSPFKHPIEELEDRVFVNCNTSIYRATSLSNCRHTSSVEE

SEQ ID NO: 3001 - protein, 42 aa, Artificial Sequence
  chemically synthesized
SQVSPFKVPIEELEDRVFVNCNTSIYRATSLSNCRHTSSVEE

SEQ ID NO: 3002 - protein, 42 aa, Artificial Sequence
  chemically synthesized
SQVSPFKFPIEELEDRVFVNCNTSIYRATSLSNCRHTSSVEE

SEQ ID NO: 3003 - protein, 42 aa, Artificial Sequence
  chemically synthesized
SQVSPFKMPIEELEDRVFVNCNTSIYRATSLSNCRHTSSVEE

SEQ ID NO: 3004 - protein, 42 aa, Artificial Sequence; identical to SEQ ID NO: 916
  chemically synthesized

SEQ ID NO: 3005 - protein, 42 aa, Artificial Sequence
  chemically synthesized
SQVSPFKIPHEELEDRVFVNCNTSIYRATSLSNCRHTSSVEE

SEQ ID NO: 3006 - protein, 42 aa, Artificial Sequence
  chemically synthesized
SQVSPFKIPVEELEDRVFVNCNTSIYRATSLSNCRHTSSVEE

SEQ ID NO: 3007 - protein, 42 aa, Artificial Sequence
  chemically synthesized
SQVSPFKIPFEELEDRVFVNCNTSIYRATSLSNCRHTSSVEE

SEQ ID NO: 3008 - protein, 42 aa, Artificial Sequence
  chemically synthesized
SQVSPFKIPMEELEDRVFVNCNTSIYRATSLSNCRHTSSVEE

SEQ ID NO: 3009 - protein, 42 aa, Artificial Sequence; identical to SEQ ID NO: 1036
  chemically synthesized

SEQ ID NO: 3010 - protein, 42 aa, Artificial Sequence
  chemically synthesized
  misc_feature (11)..(11): Xaa can be a proteinogenic, non-proteinogenic or synthetic amino acid like ornithin or selenocystein
SQVSPFKIPIXELEDRVFVNCNTSIYRATSLSNCRHTSSVEE

SEQ ID NO: 3011 - protein, 42 aa, Artificial Sequence; identical to SEQ ID NO: 1156
  chemically synthesized

SEQ ID NO: 3012 - protein, 42 aa, Artificial Sequence
  chemically synthesized
  misc_feature (12)..(12): Xaa can be a proteinogenic, non-proteinogenic or synthetic amino acid like ornithin or selenocystein
SQVSPFKIPIEXLEDRVFVNCNTSIYRATSLSNCRHTSSVEE

SEQ ID NO: 3013 - protein, 42 aa, Artificial Sequence
  chemically synthesized
SQVSPFKIPIEEVEDRVFVNCNTSIYRATSLSNCRHTSSVEE

SEQ ID NO: 3014 - protein, 42 aa, Artificial Sequence; identical to SEQ ID NO: 1273
  chemically synthesized

SEQ ID NO: 3015 - protein, 42 aa, Artificial Sequence
  chemically synthesized
SQVSPFKIPIEEFEDRVFVNCNTSIYRATSLSNCRHTSSVEE

SEQ ID NO: 3016 - protein, 42 aa, Artificial Sequence
  chemically synthesized
SQVSPFKIPIEEHEDRVFVNCNTSIYRATSLSNCRHTSSVEE

SEQ ID NO: 3017 - protein, 42 aa, Artificial Sequence
  chemically synthesized
SQVSPFKIPIEEMEDRVFVNCNTSIYRATSLSNCRHTSSVEE

SEQ ID NO: 3018 - protein, 42 aa, Artificial Sequence; identical to SEQ ID NO: 1393
  chemically synthesized

SEQ ID NO: 3019 - protein, 42 aa, Artificial Sequence
  chemically synthesized
  misc_feature (14)..(14): Xaa can be a proteinogenic, non-proteinogenic or synthetic amino acid like ornithin or selenocystein
SQVSPFKIPIEELXDRVFVNCNTSIYRATSLSNCRHTSSVEE

SEQ ID NO: 3020 - protein, 42 aa, Artificial Sequence
  chemically synthesized
  misc_feature (15)..(15): Xaa can be a proteinogenic, non-proteinogenic or synthetic amino acid like ornithin or selenocystein
SQVSPFKIPIEELEXRVFVNCNTSIYRATSLSNCRHTSSVEE

SEQ ID NO: 3021 - protein, 42 aa, Artificial Sequence
  chemically synthesized
SQVSPFKIPIEELEERVFVNCNTSIYRATSLSNCRHTSSVEE

SEQ ID NO: 3022 - protein, 42 aa, Artificial Sequence; identical to SEQ ID NO: 1512
  chemically synthesized

SEQ ID NO: 3023 - protein, 42 aa, Artificial Sequence
  chemically synthesized
SQVSPFKIPIEELEDHVFVNCNTSIYRATSLSNCRHTSSVEE

SEQ ID NO: 3024 - protein, 42 aa, Artificial Sequence
  chemically synthesized
  misc_feature (16)..(16): Xaa can be a proteinogenic, non-proteinogenic or synthetic amino acid like ornithin or selenocystein
SQVSPFKIPIEELEDXVFVNCNTSIYRATSLSNCRHTSSVEE

SEQ ID NO: 3025 - protein, 42 aa, Artificial Sequence; identical to SEQ ID NO: 1629
  chemically synthesized

SEQ ID NO: 3026 - protein, 42 aa, Artificial Sequence
  chemically synthesized
SQVSPFKIPIEELEDRLFVNCNTSIYRATSLSNCRHTSSVEE

SEQ ID NO: 3027 - protein, 42 aa, Artificial Sequence
  chemically synthesized
SQVSPFKIPIEELEDRFFVNCNTSIYRATSLSNCRHTSSVEE

SEQ ID NO: 3028 - protein, 42 aa, Artificial Sequence
  chemically synthesized
SQVSPFKIPIEELEDRHFVNCNTSIYRATSLSNCRHTSSVEE

SEQ ID NO: 3029 - protein, 42 aa, Artificial Sequence
  chemically synthesized
SQVSPFKIPIEELEDRMFVNCNTSIYRATSLSNCRHTSSVEE

SEQ ID NO: 3030 - protein, 42 aa, Artificial Sequence; identical to SEQ ID NO: 1746
  chemically synthesized

SEQ ID NO: 3031 - protein, 42 aa, Artificial Sequence
  chemically synthesized
SQVSPFKIPIEELEDRVLVNCNTSIYRATSLSNCRHTSSVEE

SEQ ID NO: 3032 - protein, 42 aa, Artificial Sequence
  chemically synthesized
SQVSPFKIPIEELEDRVVVNCNTSIYRATSLSNCRHTSSVEE

SEQ ID NO: 3033 - protein, 42 aa, Artificial Sequence
  chemically synthesized
SQVSPFKIPIEELEDRVHVNCNTSIYRATSLSNCRHTSSVEE

SEQ ID NO: 3034 - protein, 42 aa, Artificial Sequence
  chemically synthesized
SQVSPFKIPIEELEDRVMVNCNTSIYRATSLSNCRHTSSVEE

SEQ ID NO: 3035 - protein, 42 aa, Artificial Sequence; identical to SEQ ID NO: 1863
  chemically synthesized

SEQ ID NO: 3036 - protein, 42 aa, Artificial Sequence
  chemically synthesized
SQVSPFKIPIEELEDRVFLNCNTSIYRATSLSNCRHTSSVEE

SEQ ID NO: 3037 - protein, 42 aa, Artificial Sequence
  chemically synthesized
SQVSPFKIPIEELEDRVFFNCNTSIYRATSLSNCRHTSSVEE

SEQ ID NO: 3038 - protein, 42 aa, Artificial Sequence
  chemically synthesized
SQVSPFKIPIEELEDRVFHNCNTSIYRATSLSNCRHTSSVEE

SEQ ID NO: 3039 - protein, 42 aa, Artificial Sequence
  chemically synthesized
SQVSPFKIPIEELEDRVFMNCNTSIYRATSLSNCRHTSSVEE

SEQ ID NO: 3040 - protein, 42 aa, Artificial Sequence; identical to SEQ ID NO: 1984
  chemically synthesized

SEQ ID NO: 3041 - protein, 42 aa, Artificial Sequence
  chemically synthesized
SQVSPFKIPIEELEDRVFVNSNTSIYRATSLSNCRHTSSVEE

SEQ ID NO: 3042 - protein, 42 aa, Artificial Sequence
  chemically synthesized
SQVSPFKIPIEELEDRVFVNGNTSIYRATSLSNCRHTSSVEE

SEQ ID NO: 3043 - protein, 42 aa, Artificial Sequence
  chemically synthesized
SQVSPFKIPIEELEDRVFVNANTSIYRATSLSNCRHTSSVEE

SEQ ID NO: 3044 - protein, 42 aa, Artificial Sequence; identical to SEQ ID NO: 2225
  chemically synthesized

SEQ ID NO: 3045 - protein, 42 aa, Artificial Sequence; identical to SEQ ID NO: 2345
  chemically synthesized

SEQ ID NO: 3046 - protein, 42 aa, Artificial Sequence
  chemically synthesized
SQVSPFKIPIEELEDRVFVNCNYSIYRATSLSNCRHTSSVEE

SEQ ID NO: 3047 - protein, 42 aa, Artificial Sequence; identical to SEQ ID NO: 2465
  chemically synthesized

SEQ ID NO: 3048 - protein, 42 aa, Artificial Sequence
  chemically synthesized
SQVSPFKIPIEELEDRVFVNCNTYIYRATSLSNCRHTSSVEE

SEQ ID NO: 3049 - protein, 42 aa, Artificial Sequence
  chemically synthesized
SQVSPFKIPIEELEDRVFVNCNTSVYRATSLSNCRHTSSVEE

SEQ ID NO: 3050 - protein, 42 aa, Artificial Sequence; identical to SEQ ID NO: 2582
  chemically synthesized

SEQ ID NO: 3051 - protein, 42 aa, Artificial Sequence
  chemically synthesized
SQVSPFKIPIEELEDRVFVNCNTSHYRATSLSNCRHTSSVEE

SEQ ID NO: 3052 - protein, 42 aa, Artificial Sequence
  chemically synthesized
SQVSPFKIPIEELEDRVFVNCNTSFYRATSLSNCRHTSSVEE

SEQ ID NO: 3053 - protein, 42 aa, Artificial Sequence
  chemically synthesized
SQVSPFKIPIEELEDRVFVNCNTSMYRATSLSNCRHTSSVEE

SEQ ID NO: 3054 - protein, 42 aa, Artificial Sequence
  chemically synthesized
SQVSPFKIPIEELEDRVFVNCNTSIWRATSLSNCRHTSSVEE

SEQ ID NO: 3055 - protein, 42 aa, Artificial Sequence
  chemically synthesized
SQVSPFKIPIEELEDRVFVNCNTSIFRATSLSNCRHTSSVEE

SEQ ID NO: 3056 - protein, 42 aa, Artificial Sequence
  chemically synthesized
SQVSPFKIPIEELEDRVFVNCNTSISRATSLSNCRHTSSVEE

SEQ ID NO: 3057 - protein, 42 aa, Artificial Sequence; identical to SEQ ID NO: 2700
  chemically synthesized

SEQ ID NO: 3058 - protein, 42 aa, Artificial Sequence
  chemically synthesized
  misc_feature (27)..(27): Xaa can be a proteinogenic, non-proteinogenic or synthetic amino acid like ornithin or selenocystein
SQVSPFKIPIEELEDRVFVNCNTSIYXATSLSNCRHTSSVEE

SEQ ID NO: 3059 - protein, 42 aa, Artificial Sequence
  chemically synthesized
SQVSPFKIPIEELEDRVFVNCNTSIYHATSLSNCRHTSSVEE

SEQ ID NO: 3060 - protein, 42 aa, Artificial Sequence; identical to SEQ ID NO: 2819
  chemically synthesized

SEQ ID NO: 3061 - protein, 42 aa, Artificial Sequence; identical to SEQ ID NO: 2940
  chemically synthesized

SEQ ID NO: 3062 - protein, 42 aa, Artificial Sequence
  chemically synthesized
SQVSPFKIPIEELEDRVFVNCNTSIYRATTLSNCRHTSSVEE

SEQ ID NO: 3063 - protein, 42 aa, Artificial Sequence
  chemically synthesized
SQVSPFKIPIEELEDRVFVNCNTSIYRATYLSNCRHTSSVEE

SEQ ID NO: 3064 - protein, 42 aa, Artificial Sequence
  chemically synthesized
SQVSPFKIPIEELEDRVFVNCNTSIYRATSISNCRHTSSVEE

SEQ ID NO: 3065 - protein, 42 aa, Artificial Sequence
  chemically synthesized
SQVSPFKIPIEELEDRVFVNCNTSIYRATSVSNCRHTSSVEE

SEQ ID NO: 3066 - protein, 42 aa, Artificial Sequence
  chemically synthesized
SQVSPFKIPIEELEDRVFVNCNTSIYRATSFSNCRHTSSVEE

SEQ ID NO: 3067 - protein, 42 aa, Artificial Sequence
  chemically synthesized
SQVSPFKIPIEELEDRVFVNCNTSIYRATSMSNCRHTSSVEE

SEQ ID NO: 3068 - protein, 42 aa, Artificial Sequence
  chemically synthesized
SQVSPFKIPIEELEDRVFVNCNTSIYRATSHSNCRHTSSVEE

SEQ ID NO: 3069 - protein, 42 aa, Artificial Sequence
  chemically synthesized
SQVSPFKIPIEELEDRVFVNCNTSIYRATSLTNCRHTSSVEE

SEQ ID NO: 3070 - protein, 42 aa, Artificial Sequence
  chemically synthesized
SQVSPFKIPIEELEDRVFVNCNTSIYRATSLYNCRHTSSVEE

SEQ ID NO: 3071 - protein, 42 aa, Artificial Sequence
  chemically synthesized
SQVSPFKIPIEELEDRVFVNCNTSIYRATSLSQCRHTSSVEE

SEQ ID NO: 3072 - protein, 42 aa, Artificial Sequence
  chemically synthesized
SQVSPFKIPIEELEDRVFVNCNTSIYRATSLSNSRHTSSVEE

SEQ ID NO: 3073 - protein, 42 aa, Artificial Sequence
  chemically synthesized
SQVSPFKIPIEELEDRVFVNCNTSIYRATSLSNGRHTSSVEE

SEQ ID NO: 3074 - protein, 42 aa, Artificial Sequence
  chemically synthesized
SQVSPFKIPIEELEDRVFVNCNTSIYRATSLSNARHTSSVEE

SEQ ID NO: 3075 - protein, 42 aa, Artificial Sequence
  chemically synthesized
  misc_feature (35)..(35): Xaa can be a proteinogenic, non-proteinogenic or synthetic amino acid like ornithin or selenocystein
SQVSPFKIPIEELEDRVFVNCNTSIYRATSLSNCXHTSSVEE

SEQ ID NO: 3076 - protein, 42 aa, Artificial Sequence
  chemically synthesized
SQVSPFKIPIEELEDRVFVNCNTSIYRATSLSNCHHTSSVEE

SEQ ID NO: 3077 - protein, 42 aa, Artificial Sequence
  chemically synthesized
SQVSPFKIPIEELEDRVFVNCNTSIYRATSLSNCKHTSSVEE

SEQ ID NO: 3078 - protein, 42 aa, Artificial Sequence
  chemically synthesized
SQVSPFKIPIEELEDRVFVNCNTSIYRATSLSNCRGTSSVEE

SEQ ID NO: 3079 - protein, 42 aa, Artificial Sequence
  chemically synthesized
SQVSPFKIPIEELEDRVFVNCNTSIYRATSLSNCRATSSVEE

SEQ ID NO: 3080 - protein, 42 aa, Artificial Sequence
  chemically synthesized
SQVSPFKIPIEELEDRVFVNCNTSIYRATSLSNCRITSSVEE

SEQ ID NO: 3081 - protein, 42 aa, Artificial Sequence
  chemically synthesized
SQVSPFKIPIEELEDRVFVNCNTSIYRATSLSNCRLTSSVEE

SEQ ID NO: 3082 - protein, 42 aa, Artificial Sequence
  chemically synthesized
SQVSPFKIPIEELEDRVFVNCNTSIYRATSLSNCRMTSSVEE

SEQ ID NO: 3083 - protein, 42 aa, Artificial Sequence
  chemically synthesized
SQVSPFKIPIEELEDRVFVNCNTSIYRATSLSNCRVTSSVEE

SEQ ID NO: 3084 - protein, 42 aa, Artificial Sequence
  chemically synthesized
SQVSPFKIPIEELEDRVFVNCNTSIYRATSLSNCRHSSSVEE

SEQ ID NO: 3085 - protein, 42 aa, Artificial Sequence
  chemically synthesized
SQVSPFKIPIEELEDRVFVNCNTSIYRATSLSNCRHYSSVEE

SEQ ID NO: 3086 - protein, 42 aa, Artificial Sequence
  chemically synthesized
SQVSPFKIPIEELEDRVFVNCNTSIYRATSLSNCRHTTSVEE

SEQ ID NO: 3087 - protein, 42 aa, Artificial Sequence
  chemically synthesized
SQVSPFKIPIEELEDRVFVNCNTSIYRATSLSNCRHTYSVEE

SEQ ID NO: 3088 - protein, 42 aa, Artificial Sequence
  chemically synthesized
SQVSPFKIPIEELEDRVFVNCNTSIYRATSLSNCRHTSTVEE

SEQ ID NO: 3089 - protein, 42 aa, Artificial Sequence
  chemically synthesized
SQVSPFKIPIEELEDRVFVNCNTSIYRATSLSNCRHTSYVEE

SEQ ID NO: 3090 - protein, 42 aa, Artificial Sequence
  chemically synthesized
SQVSPFKIPIEELEDRVFVNCNTSIYRATSLSNCRHTSSIEE

SEQ ID NO: 3091 - protein, 42 aa, Artificial Sequence
  chemically synthesized
SQVSPFKIPIEELEDRVFVNCNTSIYRATSLSNCRHTSSLEE

SEQ ID NO: 3092 - protein, 42 aa, Artificial Sequence
  chemically synthesized
SQVSPFKIPIEELEDRVFVNCNTSIYRATSLSNCRHTSSFEE

SEQ ID NO: 3093 - protein, 42 aa, Artificial Sequence
  chemically synthesized
SQVSPFKIPIEELEDRVFVNCNTSIYRATSLSNCRHTSSHEE

SEQ ID NO: 3094 - protein, 42 aa, Artificial Sequence
  chemically synthesized
SQVSPFKIPIEELEDRVFVNCNTSIYRATSLSNCRHTSSMEE

SEQ ID NO: 3095 - protein, 42 aa, Artificial Sequence
  chemically synthesized
SQVSPFKIPIEELEDRVFVNCNTSIYRATSLSNCRHTSSVDE

SEQ ID NO: 3096 - protein, 42 aa, Artificial Sequence
  chemically synthesized
  misc_feature (41)..(41): Xaa can be a proteinogenic, non-proteinogenic or synthetic amino acid like ornithin or selenocystein
SQVSPFKIPIEELEDRVFVNCNTSIYRATSLSNCRHTSSVXE

SEQ ID NO: 3097 - protein, 42 aa, Artificial Sequence
  chemically synthesized
SQVSPFKIPIEELEDRVFVNCNTSIYRATSLSNCRHTSSVED

SEQ ID NO: 3098 - protein, 42 aa, Artificial Sequence
  chemically synthesized
  misc_feature (42)..(42): Xaa can be a proteinogenic, non-proteinogenic or synthetic amino acid like ornithin or selenocystein
SQVSPFKIPIEELEDRVFVNCNTSIYRATSLSNCRHTSSVEX

SEQ ID NO: 3099 - protein, 42 aa, Artificial Sequence
  chemically synthesized
SQVSAFKIPIEELEDRVFVNCNTSIYRATSLSNCRHTSSVEE

SEQ ID NO: 3100 - protein, 42 aa, Artificial Sequence
  chemically synthesized
SQVSGFKIPIEELEDRVFVNCNTSIYRATSLSNCRHTSSVEE

SEQ ID NO: 3101 - protein, 42 aa, Artificial Sequence
  chemically synthesized
SQVSPFKIAIEELEDRVFVNCNTSIYRATSLSNCRHTSSVEE

SEQ ID NO: 3102 - protein, 42 aa, Artificial Sequence
  chemically synthesized
SQVSPFKIGIEELEDRVFVNCNTSIYRATSLSNCRHTSSVEE

SEQ ID NO: 3103 - protein, 42 aa, Artificial Sequence; identical to SEQ ID NO: 85
  chemically synthesized

SEQ ID NO: 3104 - protein, 42 aa, Artificial Sequence; identical to SEQ ID NO: 204
  chemically synthesized

SEQ ID NO: 3105 - protein, 42 aa, Artificial Sequence
  chemically synthesized
YQVSPFKIPIEELEDRVFVNCNTSIYRASTLSNCRHTSSVEE

SEQ ID NO: 3106 - protein, 42 aa, Artificial Sequence; identical to SEQ ID NO: 324
  chemically synthesized

SEQ ID NO: 3107 - protein, 42 aa, Artificial Sequence; identical to SEQ ID NO: 442
  chemically synthesized

SEQ ID NO: 3108 - protein, 42 aa, Artificial Sequence
  chemically synthesized
SQISPFKIPIEELEDRVFVNCNTSIYRASTLSNCRHTSSVEE

SEQ ID NO: 3109 - protein, 42 aa, Artificial Sequence
  chemically synthesized
SQPSPFKIPIEELEDRVFVNCNTSIYRASTLSNCRHTSSVEE

SEQ ID NO: 3110 - protein, 42 aa, Artificial Sequence
  chemically synthesized
SQFSPFKIPIEELEDRVFVNCNTSIYRASTLSNCRHTSSVEE

SEQ ID NO: 3111 - protein, 42 aa, Artificial Sequence; identical to SEQ ID NO: 561
  chemically synthesized

SEQ ID NO: 3112 - protein, 42 aa, Artificial Sequence
  chemically synthesized
SQVYPFKIPIEELEDRVFVNCNTSIYRASTLSNCRHTSSVEE

SEQ ID NO: 3113 - protein, 42 aa, Artificial Sequence
  chemically synthesized
SQVSPWKIPIEELEDRVFVNCNTSIYRASTLSNCRHTSSVEE

SEQ ID NO: 3114 - protein, 42 aa, Artificial Sequence
  chemically synthesized
SQVSPYKIPIEELEDRVFVNCNTSIYRASTLSNCRHTSSVEE

SEQ ID NO: 3115 - protein, 42 aa, Artificial Sequence
  chemically synthesized
SQVSPHKIPIEELEDRVFVNCNTSIYRASTLSNCRHTSSVEE

SEQ ID NO: 3116 - protein, 42 aa, Artificial Sequence
  chemically synthesized
SQVSPFRIPIEELEDRVFVNCNTSIYRASTLSNCRHTSSVEE

SEQ ID NO: 3117 - protein, 42 aa, Artificial Sequence
  chemically synthesized
SQVSPFHIPIEELEDRVFVNCNTSIYRASTLSNCRHTSSVEE

SEQ ID NO: 3118 - protein, 42 aa, Artificial Sequence
  chemically synthesized
  misc_feature (7)..(7): Xaa can be a proteinogenic, non-proteinogenic or synthetic amino acid like ornithin or selenocystein
SQVSPFXIPIEELEDRVFVNCNTSIYRASTLSNCRHTSSVEE

SEQ ID NO: 3119 - protein, 42 aa, Artificial Sequence; identical to SEQ ID NO: 800
  chemically synthesized

SEQ ID NO: 3120 - protein, 42 aa, Artificial Sequence
  chemically synthesized
SQVSPFKHPIEELEDRVFVNCNTSIYRASTLSNCRHTSSVEE

SEQ ID NO: 3121 - protein, 42 aa, Artificial Sequence
  chemically synthesized
SQVSPFKVPIEELEDRVFVNCNTSIYRASTLSNCRHTSSVEE

SEQ ID NO: 3122 - protein, 42 aa, Artificial Sequence
  chemically synthesized
SQVSPFKFPIEELEDRVFVNCNTSIYRASTLSNCRHTSSVEE

SEQ ID NO: 3123 - protein, 42 aa, Artificial Sequence
  chemically synthesized
SQVSPFKMPIEELEDRVFVNCNTSIYRASTLSNCRHTSSVEE

SEQ ID NO: 3124 - protein, 42 aa, Artificial Sequence; identical to SEQ ID NO: 918
  chemically synthesized

SEQ ID NO: 3125 - protein, 42 aa, Artificial Sequence
  chemically synthesized
SQVSPFKIPHEELEDRVFVNCNTSIYRASTLSNCRHTSSVEE

SEQ ID NO: 3126 - protein, 42 aa, Artificial Sequence
  chemically synthesized
SQVSPFKIPVEELEDRVFVNCNTSIYRASTLSNCRHTSSVEE

SEQ ID NO: 3127 - protein, 42 aa, Artificial Sequence
  chemically synthesized
SQVSPFKIPFEELEDRVFVNCNTSIYRASTLSNCRHTSSVEE

SEQ ID NO: 3128 - protein, 42 aa, Artificial Sequence
  chemically synthesized
SQVSPFKIPMEELEDRVFVNCNTSIYRASTLSNCRHTSSVEE

SEQ ID NO: 3129 - protein, 42 aa, Artificial Sequence; identical to SEQ ID NO: 1038
  chemically synthesized

SEQ ID NO: 3130 - protein, 42 aa, Artificial Sequence
  chemically synthesized
  misc_feature (11)..(11): Xaa can be a proteinogenic, non-proteinogenic or synthetic amino acid like ornithin or selenocystein
SQVSPFKIPIXELEDRVFVNCNTSIYRASTLSNCRHTSSVEE

SEQ ID NO: 3131 - protein, 42 aa, Artificial Sequence; identical to SEQ ID NO: 1158
  chemically synthesized

SEQ ID NO: 3132 - protein, 42 aa, Artificial Sequence
  chemically synthesized
  misc_feature (12)..(12): Xaa can be a proteinogenic, non-proteinogenic or synthetic amino acid like ornithin or selenocystein
SQVSPFKIPIEXLEDRVFVNCNTSIYRASTLSNCRHTSSVEE

SEQ ID NO: 3133 - protein, 42 aa, Artificial Sequence
  chemically synthesized
SQVSPFKIPIEEVEDRVFVNCNTSIYRASTLSNCRHTSSVEE

SEQ ID NO: 3134 - protein, 42 aa, Artificial Sequence; identical to SEQ ID NO: 1275
  chemically synthesized

SEQ ID NO: 3135 - protein, 42 aa, Artificial Sequence
  chemically synthesized
SQVSPFKIPIEEFEDRVFVNCNTSIYRASTLSNCRHTSSVEE

SEQ ID NO: 3136 - protein, 42 aa, Artificial Sequence
  chemically synthesized
SQVSPFKIPIEEHEDRVFVNCNTSIYRASTLSNCRHTSSVEE

SEQ ID NO: 3137 - protein, 42 aa, Artificial Sequence
  chemically synthesized
SQVSPFKIPIEEMEDRVFVNCNTSIYRASTLSNCRHTSSVEE

SEQ ID NO: 3138 - protein, 42 aa, Artificial Sequence; identical to SEQ ID NO: 1395
  chemically synthesized

SEQ ID NO: 3139 - protein, 42 aa, Artificial Sequence
  chemically synthesized
  misc_feature (14)..(14): Xaa can be a proteinogenic, non-proteinogenic or synthetic amino acid like ornithin or selenocystein
SQVSPFKIPIEELXDRVFVNCNTSIYRASTLSNCRHTSSVEE

SEQ ID NO: 3140 - protein, 42 aa, Artificial Sequence
  chemically synthesized
  misc_feature (15)..(15): Xaa can be a proteinogenic, non-proteinogenic or synthetic amino acid like ornithin or selenocystein
SQVSPFKIPIEELEXRVFVNCNTSIYRASTLSNCRHTSSVEE

SEQ ID NO: 3141 - protein, 42 aa, Artificial Sequence
  chemically synthesized
SQVSPFKIPIEELEERVFVNCNTSIYRASTLSNCRHTSSVEE

SEQ ID NO: 3142 - protein, 42 aa, Artificial Sequence; identical to SEQ ID NO: 1514
  chemically synthesized

SEQ ID NO: 3143 - protein, 42 aa, Artificial Sequence
  chemically synthesized
SQVSPFKIPIEELEDHVFVNCNTSIYRASTLSNCRHTSSVEE

SEQ ID NO: 3144 - protein, 42 aa, Artificial Sequence
  chemically synthesized
  misc_feature (16)..(16): Xaa can be a proteinogenic, non-proteinogenic or synthetic amino acid like ornithin or selenocystein
SQVSPFKIPIEELEDXVFVNCNTSIYRASTLSNCRHTSSVEE

SEQ ID NO: 3145 - protein, 42 aa, Artificial Sequence; identical to SEQ ID NO: 1631
  chemically synthesized

SEQ ID NO: 3146 - protein, 42 aa, Artificial Sequence
  chemically synthesized
SQVSPFKIPIEELEDRLFVNCNTSIYRASTLSNCRHTSSVEE

SEQ ID NO: 3147 - protein, 42 aa, Artificial Sequence
  chemically synthesized
SQVSPFKIPIEELEDRFFVNCNTSIYRASTLSNCRHTSSVEE

SEQ ID NO: 3148 - protein, 42 aa, Artificial Sequence
  chemically synthesized
SQVSPFKIPIEELEDRHFVNCNTSIYRASTLSNCRHTSSVEE

SEQ ID NO: 3149 - protein, 42 aa, Artificial Sequence
  chemically synthesized
SQVSPFKIPIEELEDRMFVNCNTSIYRASTLSNCRHTSSVEE

SEQ ID NO: 3150 - protein, 42 aa, Artificial Sequence; identical to SEQ ID NO: 1748
  chemically synthesized

SEQ ID NO: 3151 - protein, 42 aa, Artificial Sequence
  chemically synthesized
SQVSPFKIPIEELEDRVLVNCNTSIYRASTLSNCRHTSSVEE

SEQ ID NO: 3152 - protein, 42 aa, Artificial Sequence
  chemically synthesized
SQVSPFKIPIEELEDRVVVNCNTSIYRASTLSNCRHTSSVEE

SEQ ID NO: 3153 - protein, 42 aa, Artificial Sequence
  chemically synthesized
SQVSPFKIPIEELEDRVHVNCNTSIYRASTLSNCRHTSSVEE

SEQ ID NO: 3154 - protein, 42 aa, Artificial Sequence
  chemically synthesized
SQVSPFKIPIEELEDRVMVNCNTSIYRASTLSNCRHTSSVEE

SEQ ID NO: 3155 - protein, 42 aa, Artificial Sequence; identical to SEQ ID NO: 1865
  chemically synthesized

SEQ ID NO: 3156 - protein, 42 aa, Artificial Sequence
  chemically synthesized
SQVSPFKIPIEELEDRVFLNCNTSIYRASTLSNCRHTSSVEE

SEQ ID NO: 3157 - protein, 42 aa, Artificial Sequence
  chemically synthesized
SQVSPFKIPIEELEDRVFFNCNTSIYRASTLSNCRHTSSVEE

SEQ ID NO: 3158 - protein, 42 aa, Artificial Sequence
  chemically synthesized
SQVSPFKIPIEELEDRVFHNCNTSIYRASTLSNCRHTSSVEE

SEQ ID NO: 3159 - protein, 42 aa, Artificial Sequence
  chemically synthesized
SQVSPFKIPIEELEDRVFMNCNTSIYRASTLSNCRHTSSVEE

SEQ ID NO: 3160 - protein, 42 aa, Artificial Sequence; identical to SEQ ID NO: 1986
  chemically synthesized

SEQ ID NO: 3161 - protein, 42 aa, Artificial Sequence
  chemically synthesized
SQVSPFKIPIEELEDRVFVNSNTSIYRASTLSNCRHTSSVEE

SEQ ID NO: 3162 - protein, 42 aa, Artificial Sequence
  chemically synthesized
SQVSPFKIPIEELEDRVFVNGNTSIYRASTLSNCRHTSSVEE

SEQ ID NO: 3163 - protein, 42 aa, Artificial Sequence
  chemically synthesized
SQVSPFKIPIEELEDRVFVNANTSIYRASTLSNCRHTSSVEE

SEQ ID NO: 3164 - protein, 42 aa, Artificial Sequence; identical to SEQ ID NO: 2227
  chemically synthesized

SEQ ID NO: 3165 - protein, 42 aa, Artificial Sequence; identical to SEQ ID NO: 2347
  chemically synthesized

SEQ ID NO: 3166 - protein, 42 aa, Artificial Sequence
  chemically synthesized
SQVSPFKIPIEELEDRVFVNCNYSIYRASTLSNCRHTSSVEE

SEQ ID NO: 3167 - protein, 42 aa, Artificial Sequence; identical to SEQ ID NO: 2467
  chemically synthesized

SEQ ID NO: 3168 - protein, 42 aa, Artificial Sequence
  chemically synthesized
SQVSPFKIPIEELEDRVFVNCNTYIYRASTLSNCRHTSSVEE

SEQ ID NO: 3169 - protein, 42 aa, Artificial Sequence
  chemically synthesized
SQVSPFKIPIEELEDRVFVNCNTSVYRASTLSNCRHTSSVEE

SEQ ID NO: 3170 - protein, 42 aa, Artificial Sequence; identical to SEQ ID NO: 2584
  chemically synthesized

SEQ ID NO: 3171 - protein, 42 aa, Artificial Sequence
  chemically synthesized
SQVSPFKIPIEELEDRVFVNCNTSHYRASTLSNCRHTSSVEE

SEQ ID NO: 3172 - protein, 42 aa, Artificial Sequence
  chemically synthesized
SQVSPFKIPIEELEDRVFVNCNTSFYRASTLSNCRHTSSVEE

SEQ ID NO: 3173 - protein, 42 aa, Artificial Sequence
  chemically synthesized
SQVSPFKIPIEELEDRVFVNCNTSMYRASTLSNCRHTSSVEE

SEQ ID NO: 3174 - protein, 42 aa, Artificial Sequence
  chemically synthesized
SQVSPFKIPIEELEDRVFVNCNTSIWRASTLSNCRHTSSVEE

SEQ ID NO: 3175 - protein, 42 aa, Artificial Sequence
  chemically synthesized
SQVSPFKIPIEELEDRVFVNCNTSIFRASTLSNCRHTSSVEE

SEQ ID NO: 3176 - protein, 42 aa, Artificial Sequence
  chemically synthesized
SQVSPFKIPIEELEDRVFVNCNTSISRASTLSNCRHTSSVEE

SEQ ID NO: 3177 - protein, 42 aa, Artificial Sequence; identical to SEQ ID NO: 2702
  chemically synthesized

SEQ ID NO: 3178 - protein, 42 aa, Artificial Sequence
  chemically synthesized
  misc_feature (27)..(27): Xaa can be a proteinogenic, non-proteinogenic or synthetic amino acid like ornithin or selenocystein
SQVSPFKIPIEELEDRVFVNCNTSIYXASTLSNCRHTSSVEE

SEQ ID NO: 3179 - protein, 42 aa, Artificial Sequence
  chemically synthesized
SQVSPFKIPIEELEDRVFVNCNTSIYHASTLSNCRHTSSVEE

SEQ ID NO: 3180 - protein, 42 aa, Artificial Sequence; identical to SEQ ID NO: 2821
  chemically synthesized

SEQ ID NO: 3181 - protein, 42 aa, Artificial Sequence; identical to SEQ ID NO: 2942
  chemically synthesized

SEQ ID NO: 3182 - protein, 42 aa, Artificial Sequence; identical to SEQ ID NO: 3062
  chemically synthesized

SEQ ID NO: 3183 - protein, 42 aa, Artificial Sequence
  chemically synthesized
SQVSPFKIPIEELEDRVFVNCNTSIYRAYTLSNCRHTSSVEE

SEQ ID NO: 3184 - protein, 42 aa, Artificial Sequence
  chemically synthesized
SQVSPFKIPIEELEDRVFVNCNTSIYRASTISNCRHTSSVEE

SEQ ID NO: 3185 - protein, 42 aa, Artificial Sequence
  chemically synthesized
SQVSPFKIPIEELEDRVFVNCNTSIYRASTVSNCRHTSSVEE

SEQ ID NO: 3186 - protein, 42 aa, Artificial Sequence
  chemically synthesized
SQVSPFKIPIEELEDRVFVNCNTSIYRASTFSNCRHTSSVEE

SEQ ID NO: 3187 - protein, 42 aa, Artificial Sequence
  chemically synthesized
SQVSPFKIPIEELEDRVFVNCNTSIYRASTMSNCRHTSSVEE

SEQ ID NO: 3188 - protein, 42 aa, Artificial Sequence
  chemically synthesized
SQVSPFKIPIEELEDRVFVNCNTSIYRASTHSNCRHTSSVEE

SEQ ID NO: 3189 - protein, 42 aa, Artificial Sequence
  chemically synthesized
SQVSPFKIPIEELEDRVFVNCNTSIYRASTLTNCRHTSSVEE

SEQ ID NO: 3190 - protein, 42 aa, Artificial Sequence
  chemically synthesized
SQVSPFKIPIEELEDRVFVNCNTSIYRASTLYNCRHTSSVEE

SEQ ID NO: 3191 - protein, 42 aa, Artificial Sequence
  chemically synthesized
  MISC_FEATURE: synthetic
SQVSPFKIPIEELEDRVFVNCNTSIYRASTLSQCRHTSSVEE

SEQ ID NO: 3192 - protein, 42 aa, Artificial Sequence
  chemically synthesized
SQVSPFKIPIEELEDRVFVNCNTSIYRASTLSNSRHTSSVEE

SEQ ID NO: 3193 - protein, 42 aa, Artificial Sequence
  chemically synthesized
SQVSPFKIPIEELEDRVFVNCNTSIYRASTLSNGRHTSSVEE

SEQ ID NO: 3194 - protein, 42 aa, Artificial Sequence
  chemically synthesized
SQVSPFKIPIEELEDRVFVNCNTSIYRASTLSNARHTSSVEE

SEQ ID NO: 3195 - protein, 42 aa, Artificial Sequence
  chemically synthesized
  misc_feature (35)..(35): Xaa can be a proteinogenic, non-proteinogenic or synthetic amino acid like ornithin or selenocystein
SQVSPFKIPIEELEDRVFVNCNTSIYRASTLSNCXHTSSVEE

SEQ ID NO: 3196 - protein, 42 aa, Artificial Sequence
  chemically synthesized
SQVSPFKIPIEELEDRVFVNCNTSIYRASTLSNCHHTSSVEE

SEQ ID NO: 3197 - protein, 42 aa, Artificial Sequence
  chemically synthesized
SQVSPFKIPIEELEDRVFVNCNTSIYRASTLSNCKHTSSVEE

SEQ ID NO: 3198 - protein, 42 aa, Artificial Sequence
  chemically synthesized
SQVSPFKIPIEELEDRVFVNCNTSIYRASTLSNCRGTSSVEE

SEQ ID NO: 3199 - protein, 42 aa, Artificial Sequence
  chemically synthesized
SQVSPFKIPIEELEDRVFVNCNTSIYRASTLSNCRATSSVEE

SEQ ID NO: 3200 - protein, 42 aa, Artificial Sequence
  chemically synthesized
SQVSPFKIPIEELEDRVFVNCNTSIYRASTLSNCRITSSVEE

SEQ ID NO: 3201 - protein, 42 aa, Artificial Sequence
  chemically synthesized
SQVSPFKIPIEELEDRVFVNCNTSIYRASTLSNCRLTSSVEE

SEQ ID NO: 3202 - protein, 42 aa, Artificial Sequence
  chemically synthesized
SQVSPFKIPIEELEDRVFVNCNTSIYRASTLSNCRMTSSVEE

SEQ ID NO: 3203 - protein, 42 aa, Artificial Sequence
  chemically synthesized
SQVSPFKIPIEELEDRVFVNCNTSIYRASTLSNCRVTSSVEE

SEQ ID NO: 3204 - protein, 42 aa, Artificial Sequence
  chemically synthesized
SQVSPFKIPIEELEDRVFVNCNTSIYRASTLSNCRHSSSVEE

SEQ ID NO: 3205 - protein, 42 aa, Artificial Sequence
  chemically synthesized
SQVSPFKIPIEELEDRVFVNCNTSIYRASTLSNCRHYSSVEE

SEQ ID NO: 3206 - protein, 42 aa, Artificial Sequence
  chemically synthesized
SQVSPFKIPIEELEDRVFVNCNTSIYRASTLSNCRHTTSVEE

SEQ ID NO: 3207 - protein, 42 aa, Artificial Sequence
  chemically synthesized
SQVSPFKIPIEELEDRVFVNCNTSIYRASTLSNCRHTYSVEE

SEQ ID NO: 3208 - protein, 42 aa, Artificial Sequence
  chemically synthesized
SQVSPFKIPIEELEDRVFVNCNTSIYRASTLSNCRHTSTVEE

SEQ ID NO: 3209 - protein, 42 aa, Artificial Sequence
  chemically synthesized
SQVSPFKIPIEELEDRVFVNCNTSIYRASTLSNCRHTSYVEE

SEQ ID NO: 3210 - protein, 42 aa, Artificial Sequence
  chemically synthesized
SQVSPFKIPIEELEDRVFVNCNTSIYRASTLSNCRHTSSIEE

SEQ ID NO: 3211 - protein, 42 aa, Artificial Sequence
  chemically synthesized
SQVSPFKIPIEELEDRVFVNCNTSIYRASTLSNCRHTSSLEE

SEQ ID NO: 3212 - protein, 42 aa, Artificial Sequence
  chemically synthesized
SQVSPFKIPIEELEDRVFVNCNTSIYRASTLSNCRHTSSFEE

SEQ ID NO: 3213 - protein, 42 aa, Artificial Sequence
  chemically synthesized
SQVSPFKIPIEELEDRVFVNCNTSIYRASTLSNCRHTSSHEE

SEQ ID NO: 3214 - protein, 42 aa, Artificial Sequence
  chemically synthesized
SQVSPFKIPIEELEDRVFVNCNTSIYRASTLSNCRHTSSMEE

SEQ ID NO: 3215 - protein, 42 aa, Artificial Sequence
  chemically synthesized
SQVSPFKIPIEELEDRVFVNCNTSIYRASTLSNCRHTSSVDE

SEQ ID NO: 3216 - protein, 42 aa, Artificial Sequence
  chemically synthesized
  misc_feature (41)..(41): Xaa can be a proteinogenic, non-proteinogenic or synthetic amino acid like ornithin or selenocystein
SQVSPFKIPIEELEDRVFVNCNTSIYRASTLSNCRHTSSVXE

SEQ ID NO: 3217 - protein, 42 aa, Artificial Sequence
  chemically synthesized
SQVSPFKIPIEELEDRVFVNCNTSIYRASTLSNCRHTSSVED

SEQ ID NO: 3218 - protein, 42 aa, Artificial Sequence
  chemically synthesized
  misc_feature (42)..(42): Xaa can be a proteinogenic, non-proteinogenic or synthetic amino acid like ornithin or selenocystein
SQVSPFKIPIEELEDRVFVNCNTSIYRASTLSNCRHTSSVEX

SEQ ID NO: 3219 - protein, 42 aa, Artificial Sequence
  chemically synthesized
SQVSAFKIPIEELEDRVFVNCNTSIYRASTLSNCRHTSSVEE

SEQ ID NO: 3220 - protein, 42 aa, Artificial Sequence
  chemically synthesized
SQVSGFKIPIEELEDRVFVNCNTSIYRASTLSNCRHTSSVEE

SEQ ID NO: 3221 - protein, 42 aa, Artificial Sequence
  chemically synthesized
SQVSPFKIAIEELEDRVFVNCNTSIYRASTLSNCRHTSSVEE

SEQ ID NO: 3222 - protein, 42 aa, Artificial Sequence
  chemically synthesized
SQVSPFKIGIEELEDRVFVNCNTSIYRASTLSNCRHTSSVEE

SEQ ID NO: 3223 - protein, 42 aa, Artificial Sequence; identical to SEQ ID NO: 87
  chemically synthesized

SEQ ID NO: 3224 - protein, 42 aa, Artificial Sequence; identical to SEQ ID NO: 206
  chemically synthesized

SEQ ID NO: 3225 - protein, 42 aa, Artificial Sequence
  chemically synthesized
YQVSPFKIPIEELEDRVFVNCNTSIYRASSISNCRHTSSVEE

SEQ ID NO: 3226 - protein, 42 aa, Artificial Sequence; identical to SEQ ID NO: 326
  chemically synthesized

SEQ ID NO: 3227 - protein, 42 aa, Artificial Sequence; identical to SEQ ID NO: 444
  chemically synthesized

SEQ ID NO: 3228 - protein, 42 aa, Artificial Sequence
  chemically synthesized
SQISPFKIPIEELEDRVFVNCNTSIYRASSISNCRHTSSVEE

SEQ ID NO: 3229 - protein, 42 aa, Artificial Sequence
  chemically synthesized
SQPSPFKIPIEELEDRVFVNCNTSIYRASSISNCRHTSSVEE

SEQ ID NO: 3230 - protein, 42 aa, Artificial Sequence
  chemically synthesized
SQFSPFKIPIEELEDRVFVNCNTSIYRASSISNCRHTSSVEE

SEQ ID NO: 3231 - protein, 42 aa, Artificial Sequence; identical to SEQ ID NO: 563
  chemically synthesized

SEQ ID NO: 3232 - protein, 42 aa, Artificial Sequence
  chemically synthesized
SQVYPFKIPIEELEDRVFVNCNTSIYRASSISNCRHTSSVEE

SEQ ID NO: 3233 - protein, 42 aa, Artificial Sequence
  chemically synthesized
SQVSPWKIPIEELEDRVFVNCNTSIYRASSISNCRHTSSVEE

SEQ ID NO: 3234 - protein, 42 aa, Artificial Sequence
  chemically synthesized
SQVSPYKIPIEELEDRVFVNCNTSIYRASSISNCRHTSSVEE

SEQ ID NO: 3235 - protein, 42 aa, Artificial Sequence
  chemically synthesized
SQVSPHKIPIEELEDRVFVNCNTSIYRASSISNCRHTSSVEE

SEQ ID NO: 3236 - protein, 42 aa, Artificial Sequence
  chemically synthesized
SQVSPFRIPIEELEDRVFVNCNTSIYRASSISNCRHTSSVEE

SEQ ID NO: 3237 - protein, 42 aa, Artificial Sequence
  chemically synthesized
SQVSPFHIPIEELEDRVFVNCNTSIYRASSISNCRHTSSVEE

SEQ ID NO: 3238 - protein, 42 aa, Artificial Sequence
  chemically synthesized
  misc_feature (7)..(7): Xaa can be a proteinogenic, non-proteinogenic or synthetic amino acid like ornithin or selenocystein
SQVSPFXIPIEELEDRVFVNCNTSIYRASSISNCRHTSSVEE

SEQ ID NO: 3239 - protein, 42 aa, Artificial Sequence; identical to SEQ ID NO: 802
  chemically synthesized

SEQ ID NO: 3240 - protein, 42 aa, Artificial Sequence
  chemically synthesized
SQVSPFKHPIEELEDRVFVNCNTSIYRASSISNCRHTSSVEE

SEQ ID NO: 3241 - protein, 42 aa, Artificial Sequence
  chemically synthesized
SQVSPFKVPIEELEDRVFVNCNTSIYRASSISNCRHTSSVEE

SEQ ID NO: 3242 - protein, 42 aa, Artificial Sequence
  chemically synthesized
SQVSPFKFPIEELEDRVFVNCNTSIYRASSISNCRHTSSVEE

SEQ ID NO: 3243 - protein, 42 aa, Artificial Sequence
  chemically synthesized
SQVSPFKMPIEELEDRVFVNCNTSIYRASSISNCRHTSSVEE

SEQ ID NO: 3244 - protein, 42 aa, Artificial Sequence; identical to SEQ ID NO: 920
  chemically synthesized

SEQ ID NO: 3245 - protein, 42 aa, Artificial Sequence
  chemically synthesized
SQVSPFKIPHEELEDRVFVNCNTSIYRASSISNCRHTSSVEE

SEQ ID NO: 3246 - protein, 42 aa, Artificial Sequence
  chemically synthesized
SQVSPFKIPVEELEDRVFVNCNTSIYRASSISNCRHTSSVEE

SEQ ID NO: 3247 - protein, 42 aa, Artificial Sequence
  chemically synthesized
SQVSPFKIPFEELEDRVFVNCNTSIYRASSISNCRHTSSVEE

SEQ ID NO: 3248 - protein, 42 aa, Artificial Sequence
  chemically synthesized
SQVSPFKIPMEELEDRVFVNCNTSIYRASSISNCRHTSSVEE

SEQ ID NO: 3249 - protein, 42 aa, Artificial Sequence; identical to SEQ ID NO: 1040
  chemically synthesized

SEQ ID NO: 3250 - protein, 42 aa, Artificial Sequence
  chemically synthesized
  misc_feature (11)..(11): Xaa can be a proteinogenic, non-proteinogenic or synthetic amino acid like ornithin or selenocystein
SQVSPFKIPIXELEDRVFVNCNTSIYRASSISNCRHTSSVEE

SEQ ID NO: 3251 - protein, 42 aa, Artificial Sequence; identical to SEQ ID NO: 1160
  chemically synthesized

SEQ ID NO: 3252 - protein, 42 aa, Artificial Sequence
  chemically synthesized
  misc_feature (12)..(12): Xaa can be a proteinogenic, non-proteinogenic or synthetic amino acid like ornithin or selenocystein
SQVSPFKIPIEXLEDRVFVNCNTSIYRASSISNCRHTSSVEE

SEQ ID NO: 3253 - protein, 42 aa, Artificial Sequence
  chemically synthesized
SQVSPFKIPIEEVEDRVFVNCNTSIYRASSISNCRHTSSVEE

SEQ ID NO: 3254 - protein, 42 aa, Artificial Sequence; identical to SEQ ID NO: 1277
  chemically synthesized

SEQ ID NO: 3255 - protein, 42 aa, Artificial Sequence
  chemically synthesized
SQVSPFKIPIEEFEDRVFVNCNTSIYRASSISNCRHTSSVEE

SEQ ID NO: 3256 - protein, 42 aa, Artificial Sequence
  chemically synthesized
SQVSPFKIPIEEHEDRVFVNCNTSIYRASSISNCRHTSSVEE

SEQ ID NO: 3257 - protein, 42 aa, Artificial Sequence
  chemically synthesized
SQVSPFKIPIEEMEDRVFVNCNTSIYRASSISNCRHTSSVEE

SEQ ID NO: 3258 - protein, 42 aa, Artificial Sequence; identical to SEQ ID NO: 1397
  chemically synthesized

SEQ ID NO: 3259 - protein, 42 aa, Artificial Sequence
  chemically synthesized
  misc_feature (14)..(14): Xaa can be a non-proteinogenic or synthetic amino acid like ornithin or selenocystein
SQVSPFKIPIEELXDRVFVNCNTSIYRASSISNCRHTSSVEE

SEQ ID NO: 3260 - protein, 42 aa, Artificial Sequence
  chemically synthesized
  misc_feature (15)..(15): Xaa can be a proteinogenic, non-proteinogenic or synthetic amino acid like ornithin or selenocystein
SQVSPFKIPIEELEXRVFVNCNTSIYRASSISNCRHTSSVEE

SEQ ID NO: 3261 - protein, 42 aa, Artificial Sequence
  chemically synthesized
SQVSPFKIPIEELEERVFVNCNTSIYRASSISNCRHTSSVEE

SEQ ID NO: 3262 - protein, 42 aa, Artificial Sequence; identical to SEQ ID NO: 1516
  chemically synthesized

SEQ ID NO: 3263 - protein, 42 aa, Artificial Sequence
  chemically synthesized
SQVSPFKIPIEELEDHVFVNCNTSIYRASSISNCRHTSSVEE

SEQ ID NO: 3264 - protein, 42 aa, Artificial Sequence
  chemically synthesized
  misc_feature (16)..(16): Xaa can be a proteinogenic, non-proteinogenic or synthetic amino acid like ornithin or selenocystein
SQVSPFKIPIEELEDXVFVNCNTSIYRASSISNCRHTSSVEE

SEQ ID NO: 3265 - protein, 42 aa, Artificial Sequence; identical to SEQ ID NO: 1633
  chemically synthesized

SEQ ID NO: 3266 - protein, 42 aa, Artificial Sequence
  chemically synthesized
SQVSPFKIPIEELEDRLFVNCNTSIYRASSISNCRHTSSVEE

SEQ ID NO: 3267 - protein, 42 aa, Artificial Sequence
  chemically synthesized
SQVSPFKIPIEELEDRFFVNCNTSIYRASSISNCRHTSSVEE

SEQ ID NO: 3268 - protein, 42 aa, Artificial Sequence
  chemically synthesized
SQVSPFKIPIEELEDRHFVNCNTSIYRASSISNCRHTSSVEE

SEQ ID NO: 3269 - protein, 42 aa, Artificial Sequence
  chemically synthesized
SQVSPFKIPIEELEDRMFVNCNTSIYRASSISNCRHTSSVEE

SEQ ID NO: 3270 - protein, 42 aa, Artificial Sequence; identical to SEQ ID NO: 1750
  chemically synthesized

SEQ ID NO: 3271 - protein, 42 aa, Artificial Sequence
  chemically synthesized
SQVSPFKIPIEELEDRVLVNCNTSIYRASSISNCRHTSSVEE

SEQ ID NO: 3272 - protein, 42 aa, Artificial Sequence
  chemically synthesized
SQVSPFKIPIEELEDRVVVNCNTSIYRASSISNCRHTSSVEE

SEQ ID NO: 3273 - protein, 42 aa, Artificial Sequence
  chemically synthesized
SQVSPFKIPIEELEDRVHVNCNTSIYRASSISNCRHTSSVEE

SEQ ID NO: 3274 - protein, 42 aa, Artificial Sequence
  chemically synthesized
SQVSPFKIPIEELEDRVMVNCNTSIYRASSISNCRHTSSVEE

SEQ ID NO: 3275 - protein, 42 aa, Artificial Sequence; identical to SEQ ID NO: 1867
  chemically synthesized

SEQ ID NO: 3276 - protein, 42 aa, Artificial Sequence
  chemically synthesized
SQVSPFKIPIEELEDRVFLNCNTSIYRASSISNCRHTSSVEE

SEQ ID NO: 3277 - protein, 42 aa, Artificial Sequence
  chemically synthesized
SQVSPFKIPIEELEDRVFFNCNTSIYRASSISNCRHTSSVEE

SEQ ID NO: 3278 - protein, 42 aa, Artificial Sequence
  chemically synthesized
SQVSPFKIPIEELEDRVFHNCNTSIYRASSISNCRHTSSVEE

SEQ ID NO: 3279 - protein, 42 aa, Artificial Sequence
  chemically synthesized
SQVSPFKIPIEELEDRVFMNCNTSIYRASSISNCRHTSSVEE

SEQ ID NO: 3280 - protein, 42 aa, Artificial Sequence; identical to SEQ ID NO: 1988
  chemically synthesized

SEQ ID NO: 3281 - protein, 42 aa, Artificial Sequence
  chemically synthesized
SQVSPFKIPIEELEDRVFVNSNTSIYRASSISNCRHTSSVEE

SEQ ID NO: 3282 - protein, 42 aa, Artificial Sequence
  chemically synthesized
SQVSPFKIPIEELEDRVFVNGNTSIYRASSISNCRHTSSVEE

SEQ ID NO: 3283 - protein, 42 aa, Artificial Sequence
  chemically synthesized
SQVSPFKIPIEELEDRVFVNANTSIYRASSISNCRHTSSVEE

SEQ ID NO: 3284 - protein, 42 aa, Artificial Sequence; identical to SEQ ID NO: 2229
  chemically synthesized

SEQ ID NO: 3285 - protein, 42 aa, Artificial Sequence; identical to SEQ ID NO: 2349
  chemically synthesized

SEQ ID NO: 3286 - protein, 42 aa, Artificial Sequence
  chemically synthesized
SQVSPFKIPIEELEDRVFVNCNYSIYRASSISNCRHTSSVEE

SEQ ID NO: 3287 - protein, 42 aa, Artificial Sequence; identical to SEQ ID NO: 2469
  chemically synthesized

SEQ ID NO: 3288 - protein, 42 aa, Artificial Sequence
  chemically synthesized
SQVSPFKIPIEELEDRVFVNCNTYIYRASSISNCRHTSSVEE

SEQ ID NO: 3289 - protein, 42 aa, Artificial Sequence
  chemically synthesized
SQVSPFKIPIEELEDRVFVNCNTSVYRASSISNCRHTSSVEE

SEQ ID NO: 3290 - protein, 42 aa, Artificial Sequence; identical to SEQ ID NO: 2586
  chemically synthesized

SEQ ID NO: 3291 - protein, 42 aa, Artificial Sequence
  chemically synthesized
SQVSPFKIPIEELEDRVFVNCNTSHYRASSISNCRHTSSVEE

SEQ ID NO: 3292 - protein, 42 aa, Artificial Sequence
  chemically synthesized
SQVSPFKIPIEELEDRVFVNCNTSFYRASSISNCRHTSSVEE

SEQ ID NO: 3293 - protein, 42 aa, Artificial Sequence
  chemically synthesized
SQVSPFKIPIEELEDRVFVNCNTSMYRASSISNCRHTSSVEE

SEQ ID NO: 3294 - protein, 42 aa, Artificial Sequence
  chemically synthesized
SQVSPFKIPIEELEDRVFVNCNTSIWRASSISNCRHTSSVEE

SEQ ID NO: 3295 - protein, 42 aa, Artificial Sequence
  chemically synthesized
SQVSPFKIPIEELEDRVFVNCNTSIFRASSISNCRHTSSVEE

SEQ ID NO: 3296 - protein, 42 aa, Artificial Sequence
  chemically synthesized
SQVSPFKIPIEELEDRVFVNCNTSISRASSISNCRHTSSVEE

SEQ ID NO: 3297 - protein, 42 aa, Artificial Sequence; identical to SEQ ID NO: 2704
  chemically synthesized

SEQ ID NO: 3298 - protein, 42 aa, Artificial Sequence
  chemically synthesized
  misc_feature (27)..(27): Xaa can be a proteinogenic, non-proteinogenic or synthetic amino acid like ornithin or selenocystein
SQVSPFKIPIEELEDRVFVNCNTSIYXASSISNCRHTSSVEE

SEQ ID NO: 3299 - protein, 42 aa, Artificial Sequence
  chemically synthesized
SQVSPFKIPIEELEDRVFVNCNTSIYHASSISNCRHTSSVEE

SEQ ID NO: 3300 - protein, 42 aa, Artificial Sequence; identical to SEQ ID NO: 2823
  chemically synthesized

SEQ ID NO: 3301 - protein, 42 aa, Artificial Sequence; identical to SEQ ID NO: 2944
  chemically synthesized

SEQ ID NO: 3302 - protein, 42 aa, Artificial Sequence; identical to SEQ ID NO: 3064
  chemically synthesized

SEQ ID NO: 3303 - protein, 42 aa, Artificial Sequence
  chemically synthesized
SQVSPFKIPIEELEDRVFVNCNTSIYRAYSISNCRHTSSVEE

SEQ ID NO: 3304 - protein, 42 aa, Artificial Sequence; identical to SEQ ID NO: 3184
  chemically synthesized

SEQ ID NO: 3305 - protein, 42 aa, Artificial Sequence
  chemically synthesized
SQVSPFKIPIEELEDRVFVNCNTSIYRASYISNCRHTSSVEE

SEQ ID NO: 3306 - protein, 42 aa, Artificial Sequence
  chemically synthesized
SQVSPFKIPIEELEDRVFVNCNTSIYRASSITNCRHTSSVEE

SEQ ID NO: 3307 - protein, 42 aa, Artificial Sequence
  chemically synthesized
SQVSPFKIPIEELEDRVFVNCNTSIYRASSIYNCRHTSSVEE

SEQ ID NO: 3308 - protein, 42 aa, Artificial Sequence
  chemically synthesized
SQVSPFKIPIEELEDRVFVNCNTSIYRASSISQCRHTSSVEE

SEQ ID NO: 3309 - protein, 42 aa, Artificial Sequence
  chemically synthesized
SQVSPFKIPIEELEDRVFVNCNTSIYRASSISNSRHTSSVEE

SEQ ID NO: 3310 - protein, 42 aa, Artificial Sequence
  chemically synthesized
SQVSPFKIPIEELEDRVFVNCNTSIYRASSISNGRHTSSVEE

SEQ ID NO: 3311 - protein, 42 aa, Artificial Sequence
  chemically synthesized
SQVSPFKIPIEELEDRVFVNCNTSIYRASSISNARHTSSVEE

SEQ ID NO: 3312 - protein, 42 aa, Artificial Sequence
  chemically synthesized
  misc_feature (35)..(35): Xaa can be a proteinogenic, non-proteinogenic or synthetic amino acid like ornithin or selenocystein
SQVSPFKIPIEELEDRVFVNCNTSIYRASSISNCXHTSSVEE

SEQ ID NO: 3313 - protein, 42 aa, Artificial Sequence
  chemically synthesized
SQVSPFKIPIEELEDRVFVNCNTSIYRASSISNCHHTSSVEE

SEQ ID NO: 3314 - protein, 42 aa, Artificial Sequence
  chemically synthesized
SQVSPFKIPIEELEDRVFVNCNTSIYRASSISNCKHTSSVEE

SEQ ID NO: 3315 - protein, 42 aa, Artificial Sequence
  chemically synthesized
SQVSPFKIPIEELEDRVFVNCNTSIYRASSISNCRGTSSVEE

SEQ ID NO: 3316 - protein, 42 aa, Artificial Sequence
  chemically synthesized
SQVSPFKIPIEELEDRVFVNCNTSIYRASSISNCRATSSVEE

SEQ ID NO: 3317 - protein, 42 aa, Artificial Sequence
  chemically synthesized
SQVSPFKIPIEELEDRVFVNCNTSIYRASSISNCRITSSVEE

SEQ ID NO: 3318 - protein, 42 aa, Artificial Sequence; identical to SEQ ID NO: 3317
  chemically synthesized

SEQ ID NO: 3319 - protein, 42 aa, Artificial Sequence
  chemically synthesized
SQVSPFKIPIEELEDRVFVNCNTSIYRASSISNCRMTSSVEE

SEQ ID NO: 3320 - protein, 42 aa, Artificial Sequence
  chemically synthesized
SQVSPFKIPIEELEDRVFVNCNTSIYRASSISNCRVTSSVEE

SEQ ID NO: 3321 - protein, 42 aa, Artificial Sequence
  chemically synthesized
SQVSPFKIPIEELEDRVFVNCNTSIYRASSISNCRHSSSVEE

SEQ ID NO: 3322 - protein, 42 aa, Artificial Sequence
  chemically synthesized
SQVSPFKIPIEELEDRVFVNCNTSIYRASSISNCRHYSSVEE

SEQ ID NO: 3323 - protein, 42 aa, Artificial Sequence
  chemically synthesized
SQVSPFKIPIEELEDRVFVNCNTSIYRASSISNCRHTTSVEE

SEQ ID NO: 3324 - protein, 42 aa, Artificial Sequence
  chemically synthesized
SQVSPFKIPIEELEDRVFVNCNTSIYRASSISNCRHTYSVEE

SEQ ID NO: 3325 - protein, 42 aa, Artificial Sequence
  chemically synthesized
SQVSPFKIPIEELEDRVFVNCNTSIYRASSISNCRHTSTVEE

SEQ ID NO: 3326 - protein, 42 aa, Artificial Sequence
  chemically synthesized
SQVSPFKIPIEELEDRVFVNCNTSIYRASSISNCRHTSYVEE

SEQ ID NO: 3327 - protein, 42 aa, Artificial Sequence
  chemically synthesized
SQVSPFKIPIEELEDRVFVNCNTSIYRASSISNCRHTSSIEE

SEQ ID NO: 3328 - protein, 42 aa, Artificial Sequence
  chemically synthesized
SQVSPFKIPIEELEDRVFVNCNTSIYRASSISNCRHTSSLEE

SEQ ID NO: 3329 - protein, 42 aa, Artificial Sequence
  chemically synthesized
SQVSPFKIPIEELEDRVFVNCNTSIYRASSISNCRHTSSFEE

SEQ ID NO: 3330 - protein, 42 aa, Artificial Sequence
  chemically synthesized
SQVSPFKIPIEELEDRVFVNCNTSIYRASSISNCRHTSSHEE

SEQ ID NO: 3331 - protein, 42 aa, Artificial Sequence
  chemically synthesized
SQVSPFKIPIEELEDRVFVNCNTSIYRASSISNCRHTSSMEE

SEQ ID NO: 3332 - protein, 42 aa, Artificial Sequence
  chemically synthesized
SQVSPFKIPIEELEDRVFVNCNTSIYRASSISNCRHTSSVDE

SEQ ID NO: 3333 - protein, 42 aa, Artificial Sequence
  chemically synthesized
  misc_feature (41)..(41): Xaa can be a proteinogenic, non-proteinogenic or synthetic amino acid like ornithin or selenocystein
SQVSPFKIPIEELEDRVFVNCNTSIYRASSISNCRHTSSVXE

SEQ ID NO: 3334 - protein, 42 aa, Artificial Sequence
  chemically synthesized
SQVSPFKIPIEELEDRVFVNCNTSIYRASSISNCRHTSSVED

SEQ ID NO: 3335 - protein, 42 aa, Artificial Sequence
  chemically synthesized
  misc_feature (42)..(42): Xaa can be a proteinogenic, non-proteinogenic or synthetic amino acid like ornithin or selenocystein
SQVSPFKIPIEELEDRVFVNCNTSIYRASSISNCRHTSSVEX

SEQ ID NO: 3336 - protein, 42 aa, Artificial Sequence
  chemically synthesized
SQVSAFKIPIEELEDRVFVNCNTSIYRASSISNCRHTSSVEE

SEQ ID NO: 3337 - protein, 42 aa, Artificial Sequence
  chemically synthesized
SQVSGFKIPIEELEDRVFVNCNTSIYRASSISNCRHTSSVEE

SEQ ID NO: 3338 - protein, 42 aa, Artificial Sequence
  chemically synthesized
SQVSPFKIAIEELEDRVFVNCNTSIYRASSISNCRHTSSVEE

SEQ ID NO: 3339 - protein, 42 aa, Artificial Sequence
  chemically synthesized
SQVSPFKIGIEELEDRVFVNCNTSIYRASSISNCRHTSSVEE

SEQ ID NO: 3340 - protein, 42 aa, Artificial Sequence; identical to SEQ ID NO: 92
  chemically synthesized

SEQ ID NO: 3341 - protein, 42 aa, Artificial Sequence; identical to SEQ ID NO: 211
  chemically synthesized

SEQ ID NO: 3342 - protein, 42 aa, Artificial Sequence
  chemically synthesized
YQVSPFKIPIEELEDRVFVNCNTSIYRASSLTNCRHTSSVEE

SEQ ID NO: 3343 - protein, 42 aa, Artificial Sequence; identical to SEQ ID NO: 331
  chemically synthesized

SEQ ID NO: 3344 - protein, 42 aa, Artificial Sequence; identical to SEQ ID NO: 449
  chemically synthesized

SEQ ID NO: 3345 - protein, 42 aa, Artificial Sequence
  chemically synthesized
SQISPFKIPIEELEDRVFVNCNTSIYRASSLTNCRHTSSVEE

SEQ ID NO: 3346 - protein, 42 aa, Artificial Sequence
  chemically synthesized
SQPSPFKIPIEELEDRVFVNCNTSIYRASSLTNCRHTSSVEE

SEQ ID NO: 3347 - protein, 42 aa, Artificial Sequence
  chemically synthesized
SQFSPFKIPIEELEDRVFVNCNTSIYRASSLTNCRHTSSVEE

SEQ ID NO: 3348 - protein, 42 aa, Artificial Sequence; identical to SEQ ID NO: 568
  chemically synthesized

SEQ ID NO: 3349 - protein, 42 aa, Artificial Sequence
  chemically synthesized
SQVYPFKIPIEELEDRVFVNCNTSIYRASSLTNCRHTSSVEE

SEQ ID NO: 3350 - protein, 42 aa, Artificial Sequence
  chemically synthesized
SQVSPWKIPIEELEDRVFVNCNTSIYRASSLTNCRHTSSVEE

SEQ ID NO: 3351 - protein, 42 aa, Artificial Sequence
  chemically synthesized
SQVSPYKIPIEELEDRVFVNCNTSIYRASSLTNCRHTSSVEE

SEQ ID NO: 3352 - protein, 42 aa, Artificial Sequence
  chemically synthesized
SQVSPHKIPIEELEDRVFVNCNTSIYRASSLTNCRHTSSVEE

SEQ ID NO: 3353 - protein, 42 aa, Artificial Sequence
  chemically synthesized
SQVSPFRIPIEELEDRVFVNCNTSIYRASSLTNCRHTSSVEE

SEQ ID NO: 3354 - protein, 42 aa, Artificial Sequence
  chemically synthesized
SQVSPFHIPIEELEDRVFVNCNTSIYRASSLTNCRHTSSVEE

SEQ ID NO: 3355 - protein, 42 aa, Artificial Sequence
  chemically synthesized
  misc_feature (7)..(7): Xaa can be a proteinogenic, non-proteinogenic or synthetic amino acid like ornithin or selenocystein
SQVSPFXIPIEELEDRVFVNCNTSIYRASSLTNCRHTSSVEE

SEQ ID NO: 3356 - protein, 42 aa, Artificial Sequence; identical to SEQ ID NO: 807
  chemically synthesized

SEQ ID NO: 3357 - protein, 42 aa, Artificial Sequence
  chemically synthesized
SQVSPFKHPIEELEDRVFVNCNTSIYRASSLTNCRHTSSVEE

SEQ ID NO: 3358 - protein, 42 aa, Artificial Sequence
  chemically synthesized
SQVSPFKVPIEELEDRVFVNCNTSIYRASSLTNCRHTSSVEE

SEQ ID NO: 3359 - protein, 42 aa, Artificial Sequence
  chemically synthesized
SQVSPFKFPIEELEDRVFVNCNTSIYRASSLTNCRHTSSVEE

SEQ ID NO: 3360 - protein, 42 aa, Artificial Sequence
  chemically synthesized
SQVSPFKMPIEELEDRVFVNCNTSIYRASSLTNCRHTSSVEE

SEQ ID NO: 3361 - protein, 42 aa, Artificial Sequence; identical to SEQ ID NO: 925
  chemically synthesized

SEQ ID NO: 3362 - protein, 42 aa, Artificial Sequence
  chemically synthesized
SQVSPFKIPHEELEDRVFVNCNTSIYRASSLTNCRHTSSVEE

SEQ ID NO: 3363 - protein, 42 aa, Artificial Sequence
  chemically synthesized
SQVSPFKIPVEELEDRVFVNCNTSIYRASSLTNCRHTSSVEE

SEQ ID NO: 3364 - protein, 42 aa, Artificial Sequence
  chemically synthesized
SQVSPFKIPFEELEDRVFVNCNTSIYRASSLTNCRHTSSVEE

SEQ ID NO: 3365 - protein, 42 aa, Artificial Sequence
  chemically synthesized
SQVSPFKIPMEELEDRVFVNCNTSIYRASSLTNCRHTSSVEE

SEQ ID NO: 3366 - protein, 42 aa, Artificial Sequence; identical to SEQ ID NO: 1045
  chemically synthesized

SEQ ID NO: 3367 - protein, 42 aa, Artificial Sequence
  chemically synthesized
  misc_feature (11)..(11): Xaa can be a proteinogenic, non-proteinogenic or synthetic amino acid like ornithin or selenocystein
SQVSPFKIPIXELEDRVFVNCNTSIYRASSLTNCRHTSSVEE

SEQ ID NO: 3368 - protein, 42 aa, Artificial Sequence; identical to SEQ ID NO: 1165
  chemically synthesized

SEQ ID NO: 3369 - protein, 42 aa, Artificial Sequence
  chemically synthesized
  misc_feature (12)..(12): Xaa can be a proteinogenic, non-proteinogenic or synthetic amino acid like ornithin or selenocystein
SQVSPFKIPIEXLEDRVFVNCNTSIYRASSLTNCRHTSSVEE

SEQ ID NO: 3370 - protein, 42 aa, Artificial Sequence
  chemically synthesized
SQVSPFKIPIEEVEDRVFVNCNTSIYRASSLTNCRHTSSVEE

SEQ ID NO: 3371 - protein, 42 aa, Artificial Sequence; identical to SEQ ID NO: 1282
  chemically synthesized

SEQ ID NO: 3372 - protein, 42 aa, Artificial Sequence
  chemically synthesized
SQVSPFKIPIEEFEDRVFVNCNTSIYRASSLTNCRHTSSVEE

SEQ ID NO: 3373 - protein, 42 aa, Artificial Sequence
  chemically synthesized
SQVSPFKIPIEEHEDRVFVNCNTSIYRASSLTNCRHTSSVEE

SEQ ID NO: 3374 - protein, 42 aa, Artificial Sequence
  chemically synthesized
SQVSPFKIPIEEMEDRVFVNCNTSIYRASSLTNCRHTSSVEE

SEQ ID NO: 3375 - protein, 42 aa, Artificial Sequence; identical to SEQ ID NO: 1402
  chemically synthesized

SEQ ID NO: 3376 - protein, 42 aa, Artificial Sequence
  chemically synthesized
  misc_feature (14)..(14): Xaa can be a proteinogenic, non-proteinogenic or synthetic amino acid like ornithin or selenocystein
SQVSPFKIPIEELXDRVFVNCNTSIYRASSLTNCRHTSSVEE

SEQ ID NO: 3377 - protein, 42 aa, Artificial Sequence
  chemically synthesized
  misc_feature (15)..(15): Xaa can be a proteinogenic, non-proteinogenic or synthetic amino acid like ornithin or selenocystein
SQVSPFKIPIEELEXRVFVNCNTSIYRASSLTNCRHTSSVEE

SEQ ID NO: 3378 - protein, 42 aa, Artificial Sequence
  chemically synthesized
SQVSPFKIPIEELEERVFVNCNTSIYRASSLTNCRHTSSVEE

SEQ ID NO: 3379 - protein, 42 aa, Artificial Sequence; identical to SEQ ID NO: 1521
  chemically synthesized

SEQ ID NO: 3380 - protein, 42 aa, Artificial Sequence
  chemically synthesized
SQVSPFKIPIEELEDHVFVNCNTSIYRASSLTNCRHTSSVEE

SEQ ID NO: 3381 - protein, 42 aa, Artificial Sequence
  chemically synthesized
  misc_feature (16)..(16): Xaa can be a proteinogenic, non-proteinogenic or synthetic amino acid like ornithin or selenocystein
SQVSPFKIPIEELEDXVFVNCNTSIYRASSLTNCRHTSSVEE

SEQ ID NO: 3382 - protein, 42 aa, Artificial Sequence; identical to SEQ ID NO: 1638
  chemically synthesized

SEQ ID NO: 3383 - protein, 42 aa, Artificial Sequence
  chemically synthesized
SQVSPFKIPIEELEDRLFVNCNTSIYRASSLTNCRHTSSVEE

SEQ ID NO: 3384 - protein, 42 aa, Artificial Sequence
  chemically synthesized
SQVSPFKIPIEELEDRFFVNCNTSIYRASSLTNCRHTSSVEE

SEQ ID NO: 3385 - protein, 42 aa, Artificial Sequence
  chemically synthesized
SQVSPFKIPIEELEDRHFVNCNTSIYRASSLTNCRHTSSVEE

SEQ ID NO: 3386 - protein, 42 aa, Artificial Sequence
  chemically synthesized
SQVSPFKIPIEELEDRMFVNCNTSIYRASSLTNCRHTSSVEE

SEQ ID NO: 3387 - protein, 42 aa, Artificial Sequence; identical to SEQ ID NO: 1755
  chemically synthesized

SEQ ID NO: 3388 - protein, 42 aa, Artificial Sequence
  chemically synthesized
SQVSPFKIPIEELEDRVLVNCNTSIYRASSLTNCRHTSSVEE

SEQ ID NO: 3389 - protein, 42 aa, Artificial Sequence
  chemically synthesized
SQVSPFKIPIEELEDRVVVNCNTSIYRASSLTNCRHTSSVEE

SEQ ID NO: 3390 - protein, 42 aa, Artificial Sequence
  chemically synthesized
SQVSPFKIPIEELEDRVHVNCNTSIYRASSLTNCRHTSSVEE

SEQ ID NO: 3391 - protein, 42 aa, Artificial Sequence
  chemically synthesized
SQVSPFKIPIEELEDRVMVNCNTSIYRASSLTNCRHTSSVEE

SEQ ID NO: 3392 - protein, 42 aa, Artificial Sequence; identical to SEQ ID NO: 1872
  chemically synthesized

SEQ ID NO: 3393 - protein, 42 aa, Artificial Sequence
  chemically synthesized
SQVSPFKIPIEELEDRVFLNCNTSIYRASSLTNCRHTSSVEE

SEQ ID NO: 3394 - protein, 42 aa, Artificial Sequence
  chemically synthesized
SQVSPFKIPIEELEDRVFFNCNTSIYRASSLTNCRHTSSVEE

SEQ ID NO: 3395 - protein, 42 aa, Artificial Sequence
  chemically synthesized
SQVSPFKIPIEELEDRVFHNCNTSIYRASSLTNCRHTSSVEE

SEQ ID NO: 3396 - protein, 42 aa, Artificial Sequence
  chemically synthesized
SQVSPFKIPIEELEDRVFMNCNTSIYRASSLTNCRHTSSVEE

SEQ ID NO: 3397 - protein, 42 aa, Artificial Sequence; identical to SEQ ID NO: 1993
  chemically synthesized

SEQ ID NO: 3398 - protein, 42 aa, Artificial Sequence
  chemically synthesized
SQVSPFKIPIEELEDRVFVNSNTSIYRASSLTNCRHTSSVEE

SEQ ID NO: 3399 - protein, 42 aa, Artificial Sequence
  chemically synthesized
SQVSPFKIPIEELEDRVFVNGNTSIYRASSLTNCRHTSSVEE

SEQ ID NO: 3400 - protein, 42 aa, Artificial Sequence
  chemically synthesized
SQVSPFKIPIEELEDRVFVNANTSIYRASSLTNCRHTSSVEE

SEQ ID NO: 3401 - protein, 42 aa, Artificial Sequence; identical to SEQ ID NO: 2234
  chemically synthesized

SEQ ID NO: 3402 - protein, 42 aa, Artificial Sequence; identical to SEQ ID NO: 2354
  chemically synthesized

SEQ ID NO: 3403 - protein, 42 aa, Artificial Sequence
  chemically synthesized
SQVSPFKIPIEELEDRVFVNCNYSIYRASSLTNCRHTSSVEE

SEQ ID NO: 3404 - protein, 42 aa, Artificial Sequence; identical to SEQ ID NO: 2474
  chemically synthesized

SEQ ID NO: 3405 - protein, 42 aa, Artificial Sequence
  chemically synthesized
SQVSPFKIPIEELEDRVFVNCNTYIYRASSLTNCRHTSSVEE

SEQ ID NO: 3406 - protein, 42 aa, Artificial Sequence
  chemically synthesized
SQVSPFKIPIEELEDRVFVNCNTSVYRASSLTNCRHTSSVEE

SEQ ID NO: 3407 - protein, 42 aa, Artificial Sequence; identical to SEQ ID NO: 2591
  chemically synthesized

SEQ ID NO: 3408 - protein, 42 aa, Artificial Sequence
  chemically synthesized
SQVSPFKIPIEELEDRVFVNCNTSHYRASSLTNCRHTSSVEE

SEQ ID NO: 3409 - protein, 42 aa, Artificial Sequence
  chemically synthesized
SQVSPFKIPIEELEDRVFVNCNTSFYRASSLTNCRHTSSVEE

SEQ ID NO: 3410 - protein, 42 aa, Artificial Sequence
  chemically synthesized
SQVSPFKIPIEELEDRVFVNCNTSMYRASSLTNCRHTSSVEE

SEQ ID NO: 3411 - protein, 42 aa, Artificial Sequence
  chemically synthesized
SQVSPFKIPIEELEDRVFVNCNTSIWRASSLTNCRHTSSVEE

SEQ ID NO: 3412 - protein, 42 aa, Artificial Sequence
  chemically synthesized
SQVSPFKIPIEELEDRVFVNCNTSIFRASSLTNCRHTSSVEE

SEQ ID NO: 3413 - protein, 42 aa, Artificial Sequence
  chemically synthesized
SQVSPFKIPIEELEDRVFVNCNTSISRASSLTNCRHTSSVEE

SEQ ID NO: 3414 - protein, 42 aa, Artificial Sequence; identical to SEQ ID NO: 2709
  chemically synthesized

SEQ ID NO: 3415 - protein, 42 aa, Artificial Sequence
  chemically synthesized
  misc_feature (27)..(27): Xaa can be a proteinogenic, non-proteinogenic or synthetic amino acid like ornithin or selenocystein
SQVSPFKIPIEELEDRVFVNCNTSIYXASSLTNCRHTSSVEE

SEQ ID NO: 3416 - protein, 42 aa, Artificial Sequence
  chemically synthesized
SQVSPFKIPIEELEDRVFVNCNTSIYHASSLTNCRHTSSVEE

SEQ ID NO: 3417 - protein, 42 aa, Artificial Sequence; identical to SEQ ID NO: 2828
  chemically synthesized

SEQ ID NO: 3418 - protein, 42 aa, Artificial Sequence; identical to SEQ ID NO: 2949
  chemically synthesized

SEQ ID NO: 3419 - protein, 42 aa, Artificial Sequence; identical to SEQ ID NO: 3069
  chemically synthesized

SEQ ID NO: 3420 - protein, 42 aa, Artificial Sequence
  chemically synthesized
SQVSPFKIPIEELEDRVFVNCNTSIYRAYSLTNCRHTSSVEE

SEQ ID NO: 3421 - protein, 42 aa, Artificial Sequence; identical to SEQ ID NO: 3189
  chemically synthesized

SEQ ID NO: 3422 - protein, 42 aa, Artificial Sequence
  chemically synthesized
SQVSPFKIPIEELEDRVFVNCNTSIYRASYLTNCRHTSSVEE

SEQ ID NO: 3423 - protein, 42 aa, Artificial Sequence; identical to SEQ ID NO: 3306
  chemically synthesized

SEQ ID NO: 3424 - protein, 42 aa, Artificial Sequence
  chemically synthesized
SQVSPFKIPIEELEDRVFVNCNTSIYRASSVTNCRHTSSVEE

SEQ ID NO: 3425 - protein, 42 aa, Artificial Sequence
  chemically synthesized
SQVSPFKIPIEELEDRVFVNCNTSIYRASSFTNCRHTSSVEE

SEQ ID NO: 3426 - protein, 42 aa, Artificial Sequence
  chemically synthesized
SQVSPFKIPIEELEDRVFVNCNTSIYRASSMTNCRHTSSVEE

SEQ ID NO: 3427 - protein, 42 aa, Artificial Sequence
  chemically synthesized
SQVSPFKIPIEELEDRVFVNCNTSIYRASSHTNCRHTSSVEE

SEQ ID NO: 3428 - protein, 42 aa, Artificial Sequence
  chemically synthesized
SQVSPFKIPIEELEDRVFVNCNTSIYRASSLTQCRHTSSVEE

SEQ ID NO: 3429 - protein, 42 aa, Artificial Sequence
  chemically synthesized
SQVSPFKIPIEELEDRVFVNCNTSIYRASSLTNSRHTSSVEE

SEQ ID NO: 3430 - protein, 42 aa, Artificial Sequence
  chemically synthesized
SQVSPFKIPIEELEDRVFVNCNTSIYRASSLTNGRHTSSVEE

SEQ ID NO: 3431 - protein, 42 aa, Artificial Sequence
  chemically synthesized
SQVSPFKIPIEELEDRVFVNCNTSIYRASSLTNARHTSSVEE

SEQ ID NO: 3432 - protein, 42 aa, Artificial Sequence
  chemically synthesized
  misc_feature (35)..(35): Xaa can be a proteinogenic, non-proteinogenic or synthetic amino acid like ornithin or selenocystein
SQVSPFKIPIEELEDRVFVNCNTSIYRASSLTNCXHTSSVEE

SEQ ID NO: 3433 - protein, 42 aa, Artificial Sequence
  chemically synthesized
SQVSPFKIPIEELEDRVFVNCNTSIYRASSLTNCHHTSSVEE

SEQ ID NO: 3434 - protein, 42 aa, Artificial Sequence
  chemically synthesized
SQVSPFKIPIEELEDRVFVNCNTSIYRASSLTNCKHTSSVEE

SEQ ID NO: 3435 - protein, 42 aa, Artificial Sequence
  chemically synthesized
SQVSPFKIPIEELEDRVFVNCNTSIYRASSLTNCRGTSSVEE

SEQ ID NO: 3436 - protein, 42 aa, Artificial Sequence
  chemically synthesized
SQVSPFKIPIEELEDRVFVNCNTSIYRASSLTNCRATSSVEE

SEQ ID NO: 3437 - protein, 42 aa, Artificial Sequence
  chemically synthesized
SQVSPFKIPIEELEDRVFVNCNTSIYRASSLTNCRITSSVEE

SEQ ID NO: 3438 - protein, 42 aa, Artificial Sequence
  chemically synthesized
SQVSPFKIPIEELEDRVFVNCNTSIYRASSLTNCRLTSSVEE

SEQ ID NO: 3439 - protein, 42 aa, Artificial Sequence
  chemically synthesized
SQVSPFKIPIEELEDRVFVNCNTSIYRASSLTNCRMTSSVEE

SEQ ID NO: 3440 - protein, 42 aa, Artificial Sequence
  chemically synthesized
SQVSPFKIPIEELEDRVFVNCNTSIYRASSLTNCRVTSSVEE

SEQ ID NO: 3441 - protein, 42 aa, Artificial Sequence
  chemically synthesized
SQVSPFKIPIEELEDRVFVNCNTSIYRASSLTNCRHSSSVEE

SEQ ID NO: 3442 - protein, 42 aa, Artificial Sequence
  chemically synthesized
SQVSPFKIPIEELEDRVFVNCNTSIYRASSLTNCRHYSSVEE

SEQ ID NO: 3443 - protein, 42 aa, Artificial Sequence
  chemically synthesized
SQVSPFKIPIEELEDRVFVNCNTSIYRASSLTNCRHTTSVEE

SEQ ID NO: 3444 - protein, 42 aa, Artificial Sequence
  chemically synthesized
SQVSPFKIPIEELEDRVFVNCNTSIYRASSLTNCRHTYSVEE

SEQ ID NO: 3445 - protein, 42 aa, Artificial Sequence
  chemically synthesized
SQVSPFKIPIEELEDRVFVNCNTSIYRASSLTNCRHTSTVEE

SEQ ID NO: 3446 - protein, 42 aa, Artificial Sequence
  chemically synthesized
SQVSPFKIPIEELEDRVFVNCNTSIYRASSLTNCRHTSYVEE

SEQ ID NO: 3447 - protein, 42 aa, Artificial Sequence
  chemically synthesized
SQVSPFKIPIEELEDRVFVNCNTSIYRASSLTNCRHTSSIEE

SEQ ID NO: 3448 - protein, 42 aa, Artificial Sequence
  chemically synthesized
SQVSPFKIPIEELEDRVFVNCNTSIYRASSLTNCRHTSSLEE

SEQ ID NO: 3449 - protein, 42 aa, Artificial Sequence
  chemically synthesized
SQVSPFKIPIEELEDRVFVNCNTSIYRASSLTNCRHTSSFEE

SEQ ID NO: 3450 - protein, 42 aa, Artificial Sequence
  chemically synthesized
SQVSPFKIPIEELEDRVFVNCNTSIYRASSLTNCRHTSSHEE

SEQ ID NO: 3451 - protein, 42 aa, Artificial Sequence
  chemically synthesized
SQVSPFKIPIEELEDRVFVNCNTSIYRASSLTNCRHTSSMEE

SEQ ID NO: 3452 - protein, 42 aa, Artificial Sequence
  chemically synthesized
SQVSPFKIPIEELEDRVFVNCNTSIYRASSLTNCRHTSSVDE

SEQ ID NO: 3453 - protein, 42 aa, Artificial Sequence
  chemically synthesized
  misc_feature (41)..(41): Xaa can be a proteinogenic, non-proteinogenic or synthetic amino acid like ornithin or selenocystein
SQVSPFKIPIEELEDRVFVNCNTSIYRASSLTNCRHTSSVXE

SEQ ID NO: 3454 - protein, 42 aa, Artificial Sequence
  chemically synthesized
SQVSPFKIPIEELEDRVFVNCNTSIYRASSLTNCRHTSSVED

SEQ ID NO: 3455 - protein, 42 aa, Artificial Sequence
  chemically synthesized
  misc_feature (42)..(42): Xaa can be a proteinogenic, non-proteinogenic or synthetic amino acid like ornithin or selenocystein
SQVSPFKIPIEELEDRVFVNCNTSIYRASSLTNCRHTSSVEX

SEQ ID NO: 3456 - protein, 42 aa, Artificial Sequence
  chemically synthesized
SQVSAFKIPIEELEDRVFVNCNTSIYRASSLTNCRHTSSVEE

SEQ ID NO: 3457 - protein, 42 aa, Artificial Sequence
  chemically synthesized
SQVSGFKIPIEELEDRVFVNCNTSIYRASSLTNCRHTSSVEE

SEQ ID NO: 3458 - protein, 42 aa, Artificial Sequence
  chemically synthesized
SQVSPFKIAIEELEDRVFVNCNTSIYRASSLTNCRHTSSVEE

SEQ ID NO: 3459 - protein, 42 aa, Artificial Sequence
  chemically synthesized
SQVSPFKIGIEELEDRVFVNCNTSIYRASSLTNCRHTSSVEE

SEQ ID NO: 3460 - protein, 42 aa, Artificial Sequence; identical to SEQ ID NO: 94
  chemically synthesized

SEQ ID NO: 3461 - protein, 42 aa, Artificial Sequence; identical to SEQ ID NO: 213
  chemically synthesized

SEQ ID NO: 3462 - protein, 42 aa, Artificial Sequence
  chemically synthesized
YQVSPFKIPIEELEDRVFVNCNTSIYRASSLSQCRHTSSVEE

SEQ ID NO: 3463 - protein, 42 aa, Artificial Sequence; identical to SEQ ID NO: 333
  chemically synthesized

SEQ ID NO: 3464 - protein, 42 aa, Artificial Sequence; identical to SEQ ID NO: 451
  chemically synthesized

SEQ ID NO: 3465 - protein, 42 aa, Artificial Sequence
  chemically synthesized
SQISPFKIPIEELEDRVFVNCNTSIYRASSLSQCRHTSSVEE

SEQ ID NO: 3466 - protein, 42 aa, Artificial Sequence
  chemically synthesized
SQPSPFKIPIEELEDRVFVNCNTSIYRASSLSQCRHTSSVEE

SEQ ID NO: 3467 - protein, 42 aa, Artificial Sequence
  chemically synthesized
SQFSPFKIPIEELEDRVFVNCNTSIYRASSLSQCRHTSSVEE

SEQ ID NO: 3468 - protein, 42 aa, Artificial Sequence; identical to SEQ ID NO: 570
  chemically synthesized

SEQ ID NO: 3469 - protein, 42 aa, Artificial Sequence
  chemically synthesized
SQVYPFKIPIEELEDRVFVNCNTSIYRASSLSQCRHTSSVEE

SEQ ID NO: 3470 - protein, 42 aa, Artificial Sequence
  chemically synthesized
SQVSPWKIPIEELEDRVFVNCNTSIYRASSLSQCRHTSSVEE

SEQ ID NO: 3471 - protein, 42 aa, Artificial Sequence
  chemically synthesized
SQVSPYKIPIEELEDRVFVNCNTSIYRASSLSQCRHTSSVEE

SEQ ID NO: 3472 - protein, 42 aa, Artificial Sequence
  chemically synthesized
SQVSPHKIPIEELEDRVFVNCNTSIYRASSLSQCRHTSSVEE

SEQ ID NO: 3473 - protein, 42 aa, Artificial Sequence
  chemically synthesized
SQVSPFRIPIEELEDRVFVNCNTSIYRASSLSQCRHTSSVEE

SEQ ID NO: 3474 - protein, 42 aa, Artificial Sequence
  chemically synthesized
SQVSPFHIPIEELEDRVFVNCNTSIYRASSLSQCRHTSSVEE

SEQ ID NO: 3475 - protein, 42 aa, Artificial Sequence
  chemically synthesized
  misc_feature (7)..(7): Xaa can be a proteinogenic, non-proteinogenic or synthetic amino acid like ornithin or selenocystein
SQVSPFXIPIEELEDRVFVNCNTSIYRASSLSQCRHTSSVEE

SEQ ID NO: 3476 - protein, 42 aa, Artificial Sequence; identical to SEQ ID NO: 809
  chemically synthesized

SEQ ID NO: 3477 - protein, 42 aa, Artificial Sequence
  chemically synthesized
SQVSPFKHPIEELEDRVFVNCNTSIYRASSLSQCRHTSSVEE

SEQ ID NO: 3478 - protein, 42 aa, Artificial Sequence
  chemically synthesized
SQVSPFKVPIEELEDRVFVNCNTSIYRASSLSQCRHTSSVEE

SEQ ID NO: 3479 - protein, 42 aa, Artificial Sequence
  chemically synthesized
SQVSPFKFPIEELEDRVFVNCNTSIYRASSLSQCRHTSSVEE

SEQ ID NO: 3480 - protein, 42 aa, Artificial Sequence
  chemically synthesized
SQVSPFKMPIEELEDRVFVNCNTSIYRASSLSQCRHTSSVEE

SEQ ID NO: 3481 - protein, 42 aa, Artificial Sequence; identical to SEQ ID NO: 927
  chemically synthesized

SEQ ID NO: 3482 - protein, 42 aa, Artificial Sequence
  chemically synthesized
SQVSPFKIPHEELEDRVFVNCNTSIYRASSLSQCRHTSSVEE

SEQ ID NO: 3483 - protein, 42 aa, Artificial Sequence
  chemically synthesized
SQVSPFKIPVEELEDRVFVNCNTSIYRASSLSQCRHTSSVEE

SEQ ID NO: 3484 - protein, 42 aa, Artificial Sequence
  chemically synthesized
SQVSPFKIPFEELEDRVFVNCNTSIYRASSLSQCRHTSSVEE

SEQ ID NO: 3485 - protein, 42 aa, Artificial Sequence
  chemically synthesized
SQVSPFKIPMEELEDRVFVNCNTSIYRASSLSQCRHTSSVEE

SEQ ID NO: 3486 - protein, 42 aa, Artificial Sequence; identical to SEQ ID NO: 1047
  chemically synthesized

SEQ ID NO: 3487 - protein, 42 aa, Artificial Sequence
  chemically synthesized
  misc_feature (11)..(11): Xaa can be a proteinogenic, non-proteinogenic or synthetic amino acid like ornithin or selenocystein
SQVSPFKIPIXELEDRVFVNCNTSIYRASSLSQCRHTSSVEE

SEQ ID NO: 3488 - protein, 42 aa, Artificial Sequence; identical to SEQ ID NO: 1167
  chemically synthesized

SEQ ID NO: 3489 - protein, 42 aa, Artificial Sequence
  chemically synthesized
  misc_feature (12)..(12): Xaa can be a proteinogenic, non-proteinogenic or synthetic amino acid like ornithin or selenocystein
SQVSPFKIPIEXLEDRVFVNCNTSIYRASSLSQCRHTSSVEE

SEQ ID NO: 3490 - protein, 42 aa, Artificial Sequence
  chemically synthesized
SQVSPFKIPIEEVEDRVFVNCNTSIYRASSLSQCRHTSSVEE

SEQ ID NO: 3491 - protein, 42 aa, Artificial Sequence; identical to SEQ ID NO: 1284
  chemically synthesized

SEQ ID NO: 3492 - protein, 42 aa, Artificial Sequence
  chemically synthesized
SQVSPFKIPIEEFEDRVFVNCNTSIYRASSLSQCRHTSSVEE

SEQ ID NO: 3493 - protein, 42 aa, Artificial Sequence
  chemically synthesized
SQVSPFKIPIEEHEDRVFVNCNTSIYRASSLSQCRHTSSVEE

SEQ ID NO: 3494 - protein, 42 aa, Artificial Sequence
  chemically synthesized
SQVSPFKIPIEEMEDRVFVNCNTSIYRASSLSQCRHTSSVEE

SEQ ID NO: 3495 - protein, 42 aa, Artificial Sequence; identical to SEQ ID NO: 1404
  chemically synthesized

SEQ ID NO: 3496 - protein, 42 aa, Artificial Sequence
  chemically synthesized
  misc_feature (14)..(14): Xaa can be a proteinogenic, non-proteinogenic or synthetic amino acid like ornithin or selenocystein
SQVSPFKIPIEELXDRVFVNCNTSIYRASSLSQCRHTSSVEE

SEQ ID NO: 3497 - protein, 42 aa, Artificial Sequence
  chemically synthesized
  misc_feature (15)..(15): Xaa can be a proteinogenic, non-proteinogenic or synthetic amino acid like ornithin or selenocystein
SQVSPFKIPIEELEXRVFVNCNTSIYRASSLSQCRHTSSVEE

SEQ ID NO: 3498 - protein, 42 aa, Artificial Sequence
  chemically synthesized
SQVSPFKIPIEELEERVFVNCNTSIYRASSLSQCRHTSSVEE

SEQ ID NO: 3499 - protein, 42 aa, Artificial Sequence; identical to SEQ ID NO: 1523
  chemically synthesized

SEQ ID NO: 3500 - protein, 42 aa, Artificial Sequence
  chemically synthesized
SQVSPFKIPIEELEDHVFVNCNTSIYRASSLSQCRHTSSVEE

SEQ ID NO: 3501 - protein, 42 aa, Artificial Sequence
  chemically synthesized
  misc_feature (16)..(16): Xaa can be a proteinogenic, non-proteinogenic or synthetic amino acid like ornithin or selenocystein
SQVSPFKIPIEELEDXVFVNCNTSIYRASSLSQCRHTSSVEE

SEQ ID NO: 3502 - protein, 42 aa, Artificial Sequence; identical to SEQ ID NO: 1640
  chemically synthesized

SEQ ID NO: 3503 - protein, 42 aa, Artificial Sequence
  chemically synthesized
SQVSPFKIPIEELEDRLFVNCNTSIYRASSLSQCRHTSSVEE

SEQ ID NO: 3504 - protein, 42 aa, Artificial Sequence
  chemically synthesized
SQVSPFKIPIEELEDRFFVNCNTSIYRASSLSQCRHTSSVEE

SEQ ID NO: 3505 - protein, 42 aa, Artificial Sequence
  chemically synthesized
SQVSPFKIPIEELEDRHFVNCNTSIYRASSLSQCRHTSSVEE

SEQ ID NO: 3506 - protein, 42 aa, Artificial Sequence
  chemically synthesized
SQVSPFKIPIEELEDRMFVNCNTSIYRASSLSQCRHTSSVEE

SEQ ID NO: 3507 - protein, 42 aa, Artificial Sequence; identical to SEQ ID NO: 1757
  chemically synthesized

SEQ ID NO: 3508 - protein, 42 aa, Artificial Sequence
  chemically synthesized
SQVSPFKIPIEELEDRVLVNCNTSIYRASSLSQCRHTSSVEE

SEQ ID NO: 3509 - protein, 42 aa, Artificial Sequence
  chemically synthesized
SQVSPFKIPIEELEDRVVVNCNTSIYRASSLSQCRHTSSVEE

SEQ ID NO: 3510 - protein, 42 aa, Artificial Sequence
  chemically synthesized
SQVSPFKIPIEELEDRVHVNCNTSIYRASSLSQCRHTSSVEE

SEQ ID NO: 3511 - protein, 42 aa, Artificial Sequence
  chemically synthesized
SQVSPFKIPIEELEDRVMVNCNTSIYRASSLSQCRHTSSVEE

SEQ ID NO: 3512 - protein, 42 aa, Artificial Sequence; identical to SEQ ID NO: 1874
  chemically synthesized

SEQ ID NO: 3513 - protein, 42 aa, Artificial Sequence
  chemically synthesized
SQVSPFKIPIEELEDRVFLNCNTSIYRASSLSQCRHTSSVEE

SEQ ID NO: 3514 - protein, 42 aa, Artificial Sequence
  chemically synthesized
SQVSPFKIPIEELEDRVFFNCNTSIYRASSLSQCRHTSSVEE

SEQ ID NO: 3515 - protein, 42 aa, Artificial Sequence
  chemically synthesized
SQVSPFKIPIEELEDRVFHNCNTSIYRASSLSQCRHTSSVEE

SEQ ID NO: 3516 - protein, 42 aa, Artificial Sequence
  chemically synthesized
SQVSPFKIPIEELEDRVFMNCNTSIYRASSLSQCRHTSSVEE

SEQ ID NO: 3517 - protein, 42 aa, Artificial Sequence; identical to SEQ ID NO: 1995
  chemically synthesized

SEQ ID NO: 3518 - protein, 42 aa, Artificial Sequence
  chemically synthesized
SQVSPFKIPIEELEDRVFVNSNTSIYRASSLSQCRHTSSVEE

SEQ ID NO: 3519 - protein, 42 aa, Artificial Sequence
  chemically synthesized
SQVSPFKIPIEELEDRVFVNGNTSIYRASSLSQCRHTSSVEE

SEQ ID NO: 3520 - protein, 42 aa, Artificial Sequence
  chemically synthesized
SQVSPFKIPIEELEDRVFVNANTSIYRASSLSQCRHTSSVEE

SEQ ID NO: 3521 - protein, 42 aa, Artificial Sequence; identical to SEQ ID NO: 2236
  chemically synthesized

SEQ ID NO: 3522 - protein, 42 aa, Artificial Sequence; identical to SEQ ID NO: 2356
  chemically synthesized

SEQ ID NO: 3523 - protein, 42 aa, Artificial Sequence
  chemically synthesized
SQVSPFKIPIEELEDRVFVNCNYSIYRASSLSQCRHTSSVEE

SEQ ID NO: 3524 - protein, 42 aa, Artificial Sequence; identical to SEQ ID NO: 2476
  chemically synthesized

SEQ ID NO: 3525 - protein, 42 aa, Artificial Sequence
  chemically synthesized
SQVSPFKIPIEELEDRVFVNCNTYIYRASSLSQCRHTSSVEE

SEQ ID NO: 3526 - protein, 42 aa, Artificial Sequence
  chemically synthesized
SQVSPFKIPIEELEDRVFVNCNTSVYRASSLSQCRHTSSVEE

SEQ ID NO: 3527 - protein, 42 aa, Artificial Sequence; identical to SEQ ID NO: 2593
  chemically synthesized

SEQ ID NO: 3528 - protein, 42 aa, Artificial Sequence
  chemically synthesized
SQVSPFKIPIEELEDRVFVNCNTSHYRASSLSQCRHTSSVEE

SEQ ID NO: 3529 - protein, 42 aa, Artificial Sequence
  chemically synthesized
SQVSPFKIPIEELEDRVFVNCNTSFYRASSLSQCRHTSSVEE

SEQ ID NO: 3530 - protein, 42 aa, Artificial Sequence
  chemically synthesized
SQVSPFKIPIEELEDRVFVNCNTSMYRASSLSQCRHTSSVEE

SEQ ID NO: 3531 - protein, 42 aa, Artificial Sequence
  chemically synthesized
SQVSPFKIPIEELEDRVFVNCNTSIWRASSLSQCRHTSSVEE

SEQ ID NO: 3532 - protein, 42 aa, Artificial Sequence
  chemically synthesized
SQVSPFKIPIEELEDRVFVNCNTSIFRASSLSQCRHTSSVEE

SEQ ID NO: 3533 - protein, 42 aa, Artificial Sequence
  chemically synthesized
SQVSPFKIPIEELEDRVFVNCNTSISRASSLSQCRHTSSVEE

SEQ ID NO: 3534 - protein, 42 aa, Artificial Sequence; identical to SEQ ID NO: 2711
  chemically synthesized

SEQ ID NO: 3535 - protein, 42 aa, Artificial Sequence
  chemically synthesized
  misc_feature (27)..(27): Xaa can be a proteinogenic, non-proteinogenic or synthetic amino acid like ornithin or selenocystein
SQVSPFKIPIEELEDRVFVNCNTSIYXASSLSQCRHTSSVEE

SEQ ID NO: 3536 - protein, 42 aa, Artificial Sequence
  chemically synthesized
SQVSPFKIPIEELEDRVFVNCNTSIYHASSLSQCRHTSSVEE

SEQ ID NO: 3537 - protein, 42 aa, Artificial Sequence; identical to SEQ ID NO: 2830
  chemically synthesized

SEQ ID NO: 3538 - protein, 42 aa, Artificial Sequence; identical to SEQ ID NO: 2951
  chemically synthesized

SEQ ID NO: 3539 - protein, 42 aa, Artificial Sequence; identical to SEQ ID NO: 3071
  chemically synthesized

SEQ ID NO: 3540 - protein, 42 aa, Artificial Sequence
  chemically synthesized
SQVSPFKIPIEELEDRVFVNCNTSIYRAYSLSQCRHTSSVEE

SEQ ID NO: 3541 - protein, 42 aa, Artificial Sequence; identical to SEQ ID NO: 3191
  chemically synthesized

SEQ ID NO: 3542 - protein, 42 aa, Artificial Sequence
  chemically synthesized
SQVSPFKIPIEELEDRVFVNCNTSIYRASYLSQCRHTSSVEE

SEQ ID NO: 3543 - protein, 42 aa, Artificial Sequence; identical to SEQ ID NO: 3308
  chemically synthesized

SEQ ID NO: 3544 - protein, 42 aa, Artificial Sequence
  chemically synthesized
SQVSPFKIPIEELEDRVFVNCNTSIYRASSVSQCRHTSSVEE

SEQ ID NO: 3545 - protein, 42 aa, Artificial Sequence
  chemically synthesized
SQVSPFKIPIEELEDRVFVNCNTSIYRASSFSQCRHTSSVEE

SEQ ID NO: 3546 - protein, 42 aa, Artificial Sequence
  chemically synthesized
SQVSPFKIPIEELEDRVFVNCNTSIYRASSMSQCRHTSSVEE

SEQ ID NO: 3547 - protein, 42 aa, Artificial Sequence
  chemically synthesized
SQVSPFKIPIEELEDRVFVNCNTSIYRASSHSQCRHTSSVEE

SEQ ID NO: 3548 - protein, 42 aa, Artificial Sequence; identical to SEQ ID NO: 3428
  chemically synthesized

SEQ ID NO: 3549 - protein, 42 aa, Artificial Sequence
  chemically synthesized
SQVSPFKIPIEELEDRVFVNCNTSIYRASSLYQCRHTSSVEE

SEQ ID NO: 3550 - protein, 42 aa, Artificial Sequence
  chemically synthesized
SQVSPFKIPIEELEDRVFVNCNTSIYRASSLSQSRHTSSVEE

SEQ ID NO: 3551 - protein, 42 aa, Artificial Sequence
  chemically synthesized
SQVSPFKIPIEELEDRVFVNCNTSIYRASSLSQGRHTSSVEE

SEQ ID NO: 3552 - protein, 42 aa, Artificial Sequence
  chemically synthesized
SQVSPFKIPIEELEDRVFVNCNTSIYRASSLSQARHTSSVEE

SEQ ID NO: 3553 - protein, 42 aa, Artificial Sequence
  chemically synthesized
  misc_feature (35)..(35): Xaa can be a non-proteinogenic or synthetic amino acid like ornithin or selenocystein
SQVSPFKIPIEELEDRVFVNCNTSIYRASSLSQCXHTSSVEE

SEQ ID NO: 3554 - protein, 42 aa, Artificial Sequence
  chemically synthesized
SQVSPFKIPIEELEDRVFVNCNTSIYRASSLSQCHHTSSVEE

SEQ ID NO: 3555 - protein, 42 aa, Artificial Sequence
  chemically synthesized
SQVSPFKIPIEELEDRVFVNCNTSIYRASSLSQCKHTSSVEE

SEQ ID NO: 3556 - protein, 42 aa, Artificial Sequence
  chemically synthesized
SQVSPFKIPIEELEDRVFVNCNTSIYRASSLSQCRGTSSVEE

SEQ ID NO: 3557 - protein, 42 aa, Artificial Sequence
  chemically synthesized
SQVSPFKIPIEELEDRVFVNCNTSIYRASSLSQCRATSSVEE

SEQ ID NO: 3558 - protein, 42 aa, Artificial Sequence
  chemically synthesized
SQVSPFKIPIEELEDRVFVNCNTSIYRASSLSQCRITSSVEE

SEQ ID NO: 3559 - protein, 42 aa, Artificial Sequence
  chemically synthesized
SQVSPFKIPIEELEDRVFVNCNTSIYRASSLSQCRLTSSVEE

SEQ ID NO: 3560 - protein, 42 aa, Artificial Sequence
  chemically synthesized
SQVSPFKIPIEELEDRVFVNCNTSIYRASSLSQCRMTSSVEE

SEQ ID NO: 3561 - protein, 42 aa, Artificial Sequence
  chemically synthesized
SQVSPFKIPIEELEDRVFVNCNTSIYRASSLSQCRVTSSVEE

SEQ ID NO: 3562 - protein, 42 aa, Artificial Sequence
  chemically synthesized
SQVSPFKIPIEELEDRVFVNCNTSIYRASSLSQCRHSSSVEE

SEQ ID NO: 3563 - protein, 42 aa, Artificial Sequence
  chemically synthesized
SQVSPFKIPIEELEDRVFVNCNTSIYRASSLSQCRHYSSVEE

SEQ ID NO: 3564 - protein, 42 aa, Artificial Sequence
  chemically synthesized
SQVSPFKIPIEELEDRVFVNCNTSIYRASSLSQCRHTTSVEE

SEQ ID NO: 3565 - protein, 42 aa, Artificial Sequence
  chemically synthesized
SQVSPFKIPIEELEDRVFVNCNTSIYRASSLSQCRHTYSVEE

SEQ ID NO: 3566 - protein, 42 aa, Artificial Sequence
  chemically synthesized
SQVSPFKIPIEELEDRVFVNCNTSIYRASSLSQCRHTSTVEE

SEQ ID NO: 3567 - protein, 42 aa, Artificial Sequence
  chemically synthesized
SQVSPFKIPIEELEDRVFVNCNTSIYRASSLSQCRHTSYVEE

SEQ ID NO: 3568 - protein, 42 aa, Artificial Sequence
  chemically synthesized
SQVSPFKIPIEELEDRVFVNCNTSIYRASSLSQCRHTSSIEE

SEQ ID NO: 3569 - protein, 42 aa, Artificial Sequence
  chemically synthesized
SQVSPFKIPIEELEDRVFVNCNTSIYRASSLSQCRHTSSLEE

SEQ ID NO: 3570 - protein, 42 aa, Artificial Sequence
  chemically synthesized
SQVSPFKIPIEELEDRVFVNCNTSIYRASSLSQCRHTSSFEE

SEQ ID NO: 3571 - protein, 42 aa, Artificial Sequence
  chemically synthesized
SQVSPFKIPIEELEDRVFVNCNTSIYRASSLSQCRHTSSHEE

SEQ ID NO: 3572 - protein, 42 aa, Artificial Sequence
  chemically synthesized
SQVSPFKIPIEELEDRVFVNCNTSIYRASSLSQCRHTSSMEE

SEQ ID NO: 3573 - protein, 42 aa, Artificial Sequence
  chemically synthesized
SQVSPFKIPIEELEDRVFVNCNTSIYRASSLSQCRHTSSVDE

SEQ ID NO: 3574 - protein, 42 aa, Artificial Sequence
  chemically synthesized
  misc_feature (41)..(41): Xaa can be a proteinogenic, non-proteinogenic or synthetic amino acid like ornithin or selenocystein
SQVSPFKIPIEELEDRVFVNCNTSIYRASSLSQCRHTSSVXE

SEQ ID NO: 3575 - protein, 42 aa, Artificial Sequence
  chemically synthesized
SQVSPFKIPIEELEDRVFVNCNTSIYRASSLSQCRHTSSVED

SEQ ID NO: 3576 - protein, 42 aa, Artificial Sequence
  chemically synthesized
  misc_feature (42)..(42): Xaa can be a proteinogenic, non-proteinogenic or synthetic amino acid like ornithin or selenocystein
SQVSPFKIPIEELEDRVFVNCNTSIYRASSLSQCRHTSSVEX

SEQ ID NO: 3577 - protein, 42 aa, Artificial Sequence
  chemically synthesized
SQVSAFKIPIEELEDRVFVNCNTSIYRASSLSQCRHTSSVEE

SEQ ID NO: 3578 - protein, 42 aa, Artificial Sequence
  chemically synthesized
SQVSGFKIPIEELEDRVFVNCNTSIYRASSLSQCRHTSSVEE

SEQ ID NO: 3579 - protein, 42 aa, Artificial Sequence
  chemically synthesized
SQVSPFKIAIEELEDRVFVNCNTSIYRASSLSQCRHTSSVEE

SEQ ID NO: 3580 - protein, 42 aa, Artificial Sequence
  chemically synthesized
SQVSPFKIGIEELEDRVFVNCNTSIYRASSLSQCRHTSSVEE

SEQ ID NO: 3581 - protein, 42 aa, Artificial Sequence; identical to SEQ ID NO: 100
  chemically synthesized

SEQ ID NO: 3582 - protein, 42 aa, Artificial Sequence; identical to SEQ ID NO: 219
  chemically synthesized

SEQ ID NO: 3583 - protein, 42 aa, Artificial Sequence
  chemically synthesized
YQVSPFKIPIEELEDRVFVNCNTSIYRASSLSNCKHTSSVEE

SEQ ID NO: 3584 - protein, 42 aa, Artificial Sequence; identical to SEQ ID NO: 339
  chemically synthesized

SEQ ID NO: 3585 - protein, 42 aa, Artificial Sequence; identical to SEQ ID NO: 457
  chemically synthesized

SEQ ID NO: 3586 - protein, 42 aa, Artificial Sequence
  chemically synthesized
SQISPFKIPIEELEDRVFVNCNTSIYRASSLSNCKHTSSVEE

SEQ ID NO: 3587 - protein, 42 aa, Artificial Sequence
  chemically synthesized
SQPSPFKIPIEELEDRVFVNCNTSIYRASSLSNCKHTSSVEE

SEQ ID NO: 3588 - protein, 42 aa, Artificial Sequence
  chemically synthesized
SQFSPFKIPIEELEDRVFVNCNTSIYRASSLSNCKHTSSVEE

SEQ ID NO: 3589 - protein, 42 aa, Artificial Sequence; identical to SEQ ID NO: 576
  chemically synthesized

SEQ ID NO: 3590 - protein, 42 aa, Artificial Sequence
  chemically synthesized
SQVYPFKIPIEELEDRVFVNCNTSIYRASSLSNCKHTSSVEE

SEQ ID NO: 3591 - protein, 42 aa, Artificial Sequence
  chemically synthesized
SQVSPWKIPIEELEDRVFVNCNTSIYRASSLSNCKHTSSVEE

SEQ ID NO: 3592 - protein, 42 aa, Artificial Sequence
  chemically synthesized
SQVSPYKIPIEELEDRVFVNCNTSIYRASSLSNCKHTSSVEE

SEQ ID NO: 3593 - protein, 42 aa, Artificial Sequence
  chemically synthesized
SQVSPHKIPIEELEDRVFVNCNTSIYRASSLSNCKHTSSVEE

SEQ ID NO: 3594 - protein, 42 aa, Artificial Sequence
  chemically synthesized
SQVSPFRIPIEELEDRVFVNCNTSIYRASSLSNCKHTSSVEE

SEQ ID NO: 3595 - protein, 42 aa, Artificial Sequence
  chemically synthesized
SQVSPFHIPIEELEDRVFVNCNTSIYRASSLSNCKHTSSVEE

SEQ ID NO: 3596 - protein, 42 aa, Artificial Sequence
  chemically synthesized
  misc_feature (7)..(7): Xaa can be a proteinogenic, non-proteinogenic or synthetic amino acid like ornithin or selenocystein
SQVSPFXIPIEELEDRVFVNCNTSIYRASSLSNCKHTSSVEE

SEQ ID NO: 3597 - protein, 42 aa, Artificial Sequence; identical to SEQ ID NO: 815
  chemically synthesized

SEQ ID NO: 3598 - protein, 42 aa, Artificial Sequence
  chemically synthesized
SQVSPFKHPIEELEDRVFVNCNTSIYRASSLSNCKHTSSVEE

SEQ ID NO: 3599 - protein, 42 aa, Artificial Sequence
  chemically synthesized
SQVSPFKVPIEELEDRVFVNCNTSIYRASSLSNCKHTSSVEE

SEQ ID NO: 3600 - protein, 42 aa, Artificial Sequence
  chemically synthesized
SQVSPFKFPIEELEDRVFVNCNTSIYRASSLSNCKHTSSVEE

SEQ ID NO: 3601 - protein, 42 aa, Artificial Sequence
  chemically synthesized
SQVSPFKMPIEELEDRVFVNCNTSIYRASSLSNCKHTSSVEE

SEQ ID NO: 3602 - protein, 42 aa, Artificial Sequence; identical to SEQ ID NO: 933
  chemically synthesized

SEQ ID NO: 3603 - protein, 42 aa, Artificial Sequence
  chemically synthesized
SQVSPFKIPHEELEDRVFVNCNTSIYRASSLSNCKHTSSVEE

SEQ ID NO: 3604 - protein, 42 aa, Artificial Sequence
  chemically synthesized
SQVSPFKIPVEELEDRVFVNCNTSIYRASSLSNCKHTSSVEE

SEQ ID NO: 3605 - protein, 42 aa, Artificial Sequence
  chemically synthesized
SQVSPFKIPFEELEDRVFVNCNTSIYRASSLSNCKHTSSVEE

SEQ ID NO: 3606 - protein, 42 aa, Artificial Sequence
  chemically synthesized
SQVSPFKIPMEELEDRVFVNCNTSIYRASSLSNCKHTSSVEE

SEQ ID NO: 3607 - protein, 42 aa, Artificial Sequence; identical to SEQ ID NO: 1053
  chemically synthesized

SEQ ID NO: 3608 - protein, 42 aa, Artificial Sequence
  chemically synthesized
  misc_feature (11)..(11): Xaa can be a proteinogenic, non-proteinogenic or synthetic amino acid like ornithin or selenocystein
SQVSPFKIPIXELEDRVFVNCNTSIYRASSLSNCKHTSSVEE

SEQ ID NO: 3609 - protein, 42 aa, Artificial Sequence; identical to SEQ ID NO: 1173
  chemically synthesized

SEQ ID NO: 3610 - protein, 42 aa, Artificial Sequence
  chemically synthesized
  misc_feature (12)..(12): Xaa can be a proteinogenic, non-proteinogenic or synthetic amino acid like ornithin or selenocystein
SQVSPFKIPIEXLEDRVFVNCNTSIYRASSLSNCKHTSSVEE

SEQ ID NO: 3611 - protein, 42 aa, Artificial Sequence
  chemically synthesized
SQVSPFKIPIEEVEDRVFVNCNTSIYRASSLSNCKHTSSVEE

SEQ ID NO: 3612 - protein, 42 aa, Artificial Sequence; identical to SEQ ID NO: 1290
  chemically synthesized

SEQ ID NO: 3613 - protein, 42 aa, Artificial Sequence
  chemically synthesized
SQVSPFKIPIEEFEDRVFVNCNTSIYRASSLSNCKHTSSVEE

SEQ ID NO: 3614 - protein, 42 aa, Artificial Sequence
  chemically synthesized
SQVSPFKIPIEEHEDRVFVNCNTSIYRASSLSNCKHTSSVEE

SEQ ID NO: 3615 - protein, 42 aa, Artificial Sequence
  chemically synthesized
SQVSPFKIPIEEMEDRVFVNCNTSIYRASSLSNCKHTSSVEE

SEQ ID NO: 3616 - protein, 42 aa, Artificial Sequence; identical to SEQ ID NO: 1410
  chemically synthesized

SEQ ID NO: 3617 - protein, 42 aa, Artificial Sequence
  chemically synthesized
  misc_feature (14)..(14): Xaa can be a proteinogenic, non-proteinogenic or synthetic amino acid like ornithin or selenocystein
SQVSPFKIPIEELXDRVFVNCNTSIYRASSLSNCKHTSSVEE

SEQ ID NO: 3618 - protein, 42 aa, Artificial Sequence
  chemically synthesized
  misc_feature (15)..(15): Xaa can be a proteinogenic, non-proteinogenic or synthetic amino acid like ornithin or selenocystein
SQVSPFKIPIEELEXRVFVNCNTSIYRASSLSNCKHTSSVEE

SEQ ID NO: 3619 - protein, 42 aa, Artificial Sequence
  chemically synthesized
SQVSPFKIPIEELEERVFVNCNTSIYRASSLSNCKHTSSVEE

SEQ ID NO: 3620 - protein, 42 aa, Artificial Sequence; identical to SEQ ID NO: 1529
  chemically synthesized

SEQ ID NO: 3621 - protein, 42 aa, Artificial Sequence
  chemically synthesized
SQVSPFKIPIEELEDHVFVNCNTSIYRASSLSNCKHTSSVEE

SEQ ID NO: 3622 - protein, 42 aa, Artificial Sequence
  chemically synthesized
  misc_feature (16)..(16): Xaa can be a proteinogenic, non-proteinogenic or synthetic amino acid like ornithin or selenocystein
SQVSPFKIPIEELEDXVFVNCNTSIYRASSLSNCKHTSSVEE

SEQ ID NO: 3623 - protein, 42 aa, Artificial Sequence; identical to SEQ ID NO: 1646
  chemically synthesized

SEQ ID NO: 3624 - protein, 42 aa, Artificial Sequence
  chemically synthesized
SQVSPFKIPIEELEDRLFVNCNTSIYRASSLSNCKHTSSVEE

SEQ ID NO: 3625 - protein, 42 aa, Artificial Sequence
  chemically synthesized
SQVSPFKIPIEELEDRFFVNCNTSIYRASSLSNCKHTSSVEE

SEQ ID NO: 3626 - protein, 42 aa, Artificial Sequence
  chemically synthesized
SQVSPFKIPIEELEDRHFVNCNTSIYRASSLSNCKHTSSVEE

SEQ ID NO: 3627 - protein, 42 aa, Artificial Sequence
  chemically synthesized
SQVSPFKIPIEELEDRMFVNCNTSIYRASSLSNCKHTSSVEE

SEQ ID NO: 3628 - protein, 42 aa, Artificial Sequence; identical to SEQ ID NO: 1763
  chemically synthesized

SEQ ID NO: 3629 - protein, 42 aa, Artificial Sequence
  chemically synthesized
SQVSPFKIPIEELEDRVLVNCNTSIYRASSLSNCKHTSSVEE

SEQ ID NO: 3630 - protein, 42 aa, Artificial Sequence
  chemically synthesized
SQVSPFKIPIEELEDRVVVNCNTSIYRASSLSNCKHTSSVEE

SEQ ID NO: 3631 - protein, 42 aa, Artificial Sequence
  chemically synthesized
SQVSPFKIPIEELEDRVHVNCNTSIYRASSLSNCKHTSSVEE

SEQ ID NO: 3632 - protein, 42 aa, Artificial Sequence
  chemically synthesized
SQVSPFKIPIEELEDRVMVNCNTSIYRASSLSNCKHTSSVEE

SEQ ID NO: 3633 - protein, 42 aa, Artificial Sequence; identical to SEQ ID NO: 1880
  chemically synthesized

SEQ ID NO: 3634 - protein, 42 aa, Artificial Sequence
  chemically synthesized
SQVSPFKIPIEELEDRVFLNCNTSIYRASSLSNCKHTSSVEE

SEQ ID NO: 3635 - protein, 42 aa, Artificial Sequence
  chemically synthesized
SQVSPFKIPIEELEDRVFFNCNTSIYRASSLSNCKHTSSVEE

SEQ ID NO: 3636 - protein, 42 aa, Artificial Sequence
  chemically synthesized
SQVSPFKIPIEELEDRVFHNCNTSIYRASSLSNCKHTSSVEE

SEQ ID NO: 3637 - protein, 42 aa, Artificial Sequence
  chemically synthesized
SQVSPFKIPIEELEDRVFMNCNTSIYRASSLSNCKHTSSVEE

SEQ ID NO: 3638 - protein, 42 aa, Artificial Sequence; identical to SEQ ID NO: 2001
  chemically synthesized

SEQ ID NO: 3639 - protein, 42 aa, Artificial Sequence
  chemically synthesized
SQVSPFKIPIEELEDRVFVNSNTSIYRASSLSNCKHTSSVEE

SEQ ID NO: 3640 - protein, 42 aa, Artificial Sequence
  chemically synthesized
SQVSPFKIPIEELEDRVFVNGNTSIYRASSLSNCKHTSSVEE

SEQ ID NO: 3641 - protein, 42 aa, Artificial Sequence
  chemically synthesized
SQVSPFKIPIEELEDRVFVNANTSIYRASSLSNCKHTSSVEE

SEQ ID NO: 3642 - protein, 42 aa, Artificial Sequence; identical to SEQ ID NO: 2242
  chemically synthesized

SEQ ID NO: 3643 - protein, 42 aa, Artificial Sequence; identical to SEQ ID NO: 2362
  chemically synthesized

SEQ ID NO: 3644 - protein, 42 aa, Artificial Sequence
  chemically synthesized
SQVSPFKIPIEELEDRVFVNCNYSIYRASSLSNCKHTSSVEE

SEQ ID NO: 3645 - protein, 42 aa, Artificial Sequence; identical to SEQ ID NO: 2482
  chemically synthesized

SEQ ID NO: 3646 - protein, 42 aa, Artificial Sequence
  chemically synthesized
SQVSPFKIPIEELEDRVFVNCNTYIYRASSLSNCKHTSSVEE

SEQ ID NO: 3647 - protein, 42 aa, Artificial Sequence
  chemically synthesized
SQVSPFKIPIEELEDRVFVNCNTSVYRASSLSNCKHTSSVEE

SEQ ID NO: 3648 - protein, 42 aa, Artificial Sequence; identical to SEQ ID NO: 2599
  chemically synthesized

SEQ ID NO: 3649 - protein, 42 aa, Artificial Sequence
  chemically synthesized
SQVSPFKIPIEELEDRVFVNCNTSHYRASSLSNCKHTSSVEE

SEQ ID NO: 3650 - protein, 42 aa, Artificial Sequence
  chemically synthesized
SQVSPFKIPIEELEDRVFVNCNTSFYRASSLSNCKHTSSVEE

SEQ ID NO: 3651 - protein, 42 aa, Artificial Sequence
  chemically synthesized
SQVSPFKIPIEELEDRVFVNCNTSMYRASSLSNCKHTSSVEE

SEQ ID NO: 3652 - protein, 42 aa, Artificial Sequence
  chemically synthesized
SQVSPFKIPIEELEDRVFVNCNTSIWRASSLSNCKHTSSVEE

SEQ ID NO: 3653 - protein, 42 aa, Artificial Sequence
  chemically synthesized
SQVSPFKIPIEELEDRVFVNCNTSIFRASSLSNCKHTSSVEE

SEQ ID NO: 3654 - protein, 42 aa, Artificial Sequence
  chemically synthesized
SQVSPFKIPIEELEDRVFVNCNTSISRASSLSNCKHTSSVEE

SEQ ID NO: 3655 - protein, 42 aa, Artificial Sequence; identical to SEQ ID NO: 2717
  chemically synthesized

SEQ ID NO: 3656 - protein, 42 aa, Artificial Sequence
  chemically synthesized
  misc_feature (27)..(27): Xaa can be a proteinogenic, non-proteinogenic or synthetic amino acid like ornithin or selenocystein
SQVSPFKIPIEELEDRVFVNCNTSIYXASSLSNCKHTSSVEE

SEQ ID NO: 3657 - protein, 42 aa, Artificial Sequence
  chemically synthesized
SQVSPFKIPIEELEDRVFVNCNTSIYHASSLSNCKHTSSVEE

SEQ ID NO: 3658 - protein, 42 aa, Artificial Sequence; identical to SEQ ID NO: 2836
  chemically synthesized

SEQ ID NO: 3659 - protein, 42 aa, Artificial Sequence; identical to SEQ ID NO: 2957
  chemically synthesized

SEQ ID NO: 3660 - protein, 42 aa, Artificial Sequence; identical to SEQ ID NO: 3077
  chemically synthesized

SEQ ID NO: 3661 - protein, 42 aa, Artificial Sequence
  chemically synthesized
SQVSPFKIPIEELEDRVFVNCNTSIYRAYSLSNCKHTSSVEE

SEQ ID NO: 3662 - protein, 42 aa, Artificial Sequence; identical to SEQ ID NO: 3197
  chemically synthesized

SEQ ID NO: 3663 - protein, 42 aa, Artificial Sequence
  chemically synthesized
SQVSPFKIPIEELEDRVFVNCNTSIYRASYLSNCKHTSSVEE

SEQ ID NO: 3664 - protein, 42 aa, Artificial Sequence; identical to SEQ ID NO: 3314
  chemically synthesized

SEQ ID NO: 3665 - protein, 42 aa, Artificial Sequence
  chemically synthesized
SQVSPFKIPIEELEDRVFVNCNTSIYRASSVSNCKHTSSVEE

SEQ ID NO: 3666 - protein, 42 aa, Artificial Sequence
  chemically synthesized
SQVSPFKIPIEELEDRVFVNCNTSIYRASSFSNCKHTSSVEE

SEQ ID NO: 3667 - protein, 42 aa, Artificial Sequence
  chemically synthesized
SQVSPFKIPIEELEDRVFVNCNTSIYRASSMSNCKHTSSVEE

SEQ ID NO: 3668 - protein, 42 aa, Artificial Sequence
  chemically synthesized
SQVSPFKIPIEELEDRVFVNCNTSIYRASSHSNCKHTSSVEE

SEQ ID NO: 3669 - protein, 42 aa, Artificial Sequence; identical to SEQ ID NO: 3434
  chemically synthesized

SEQ ID NO: 3670 - protein, 42 aa, Artificial Sequence
  chemically synthesized
SQVSPFKIPIEELEDRVFVNCNTSIYRASSLYNCKHTSSVEE

SEQ ID NO: 3671 - protein, 42 aa, Artificial Sequence; identical to SEQ ID NO: 3555
  chemically synthesized

SEQ ID NO: 3672 - protein, 42 aa, Artificial Sequence
  chemically synthesized
SQVSPFKIPIEELEDRVFVNCNTSIYRASSLSNSKHTSSVEE

SEQ ID NO: 3673 - protein, 42 aa, Artificial Sequence
  chemically synthesized
SQVSPFKIPIEELEDRVFVNCNTSIYRASSLSNGKHTSSVEE

SEQ ID NO: 3674 - protein, 42 aa, Artificial Sequence
  chemically synthesized
SQVSPFKIPIEELEDRVFVNCNTSIYRASSLSNAKHTSSVEE

SEQ ID NO: 3675 - protein, 42 aa, Artificial Sequence
  chemically synthesized
SQVSPFKIPIEELEDRVFVNCNTSIYRASSLSNCKGTSSVEE

SEQ ID NO: 3676 - protein, 42 aa, Artificial Sequence
  chemically synthesized
SQVSPFKIPIEELEDRVFVNCNTSIYRASSLSNCKATSSVEE

SEQ ID NO: 3677 - protein, 42 aa, Artificial Sequence
  chemically synthesized
SQVSPFKIPIEELEDRVFVNCNTSIYRASSLSNCKITSSVEE

SEQ ID NO: 3678 - protein, 42 aa, Artificial Sequence
  chemically synthesized
SQVSPFKIPIEELEDRVFVNCNTSIYRASSLSNCKLTSSVEE

SEQ ID NO: 3679 - protein, 42 aa, Artificial Sequence
  chemically synthesized
SQVSPFKIPIEELEDRVFVNCNTSIYRASSLSNCKMTSSVEE

SEQ ID NO: 3680 - protein, 42 aa, Artificial Sequence
  chemically synthesized
SQVSPFKIPIEELEDRVFVNCNTSIYRASSLSNCKVTSSVEE

SEQ ID NO: 3681 - protein, 42 aa, Artificial Sequence
  chemically synthesized
SQVSPFKIPIEELEDRVFVNCNTSIYRASSLSNCKHSSSVEE

SEQ ID NO: 3682 - protein, 42 aa, Artificial Sequence
  chemically synthesized
SQVSPFKIPIEELEDRVFVNCNTSIYRASSLSNCKHYSSVEE

SEQ ID NO: 3683 - protein, 42 aa, Artificial Sequence
  chemically synthesized
SQVSPFKIPIEELEDRVFVNCNTSIYRASSLSNCKHTTSVEE

SEQ ID NO: 3684 - protein, 42 aa, Artificial Sequence
  chemically synthesized
SQVSPFKIPIEELEDRVFVNCNTSIYRASSLSNCKHTYSVEE

SEQ ID NO: 3685 - protein, 42 aa, Artificial Sequence
  chemically synthesized
SQVSPFKIPIEELEDRVFVNCNTSIYRASSLSNCKHTSTVEE

SEQ ID NO: 3686 - protein, 42 aa, Artificial Sequence
  chemically synthesized
SQVSPFKIPIEELEDRVFVNCNTSIYRASSLSNCKHTSYVEE

SEQ ID NO: 3687 - protein, 42 aa, Artificial Sequence
  chemically synthesized
SQVSPFKIPIEELEDRVFVNCNTSIYRASSLSNCKHTSSIEE

SEQ ID NO: 3688 - protein, 42 aa, Artificial Sequence
  chemically synthesized
SQVSPFKIPIEELEDRVFVNCNTSIYRASSLSNCKHTSSLEE

SEQ ID NO: 3689 - protein, 42 aa, Artificial Sequence
  chemically synthesized
SQVSPFKIPIEELEDRVFVNCNTSIYRASSLSNCKHTSSFEE

SEQ ID NO: 3690 - protein, 42 aa, Artificial Sequence
  chemically synthesized
SQVSPFKIPIEELEDRVFVNCNTSIYRASSLSNCKHTSSHEE

SEQ ID NO: 3691 - protein, 42 aa, Artificial Sequence
  chemically synthesized
SQVSPFKIPIEELEDRVFVNCNTSIYRASSLSNCKHTSSMEE

SEQ ID NO: 3692 - protein, 42 aa, Artificial Sequence
  chemically synthesized
SQVSPFKIPIEELEDRVFVNCNTSIYRASSLSNCKHTSSVDE

SEQ ID NO: 3693 - protein, 42 aa, Artificial Sequence
  chemically synthesized
  misc_feature (41)..(41): Xaa can be a proteinogenic, non-proteinogenic or synthetic amino acid like ornithin or selenocystein
SQVSPFKIPIEELEDRVFVNCNTSIYRASSLSNCKHTSSVXE

SEQ ID NO: 3694 - protein, 42 aa, Artificial Sequence
  chemically synthesized
SQVSPFKIPIEELEDRVFVNCNTSIYRASSLSNCKHTSSVED

SEQ ID NO: 3695 - protein, 42 aa, Artificial Sequence
  chemically synthesized
  misc_feature (42)..(42): Xaa can be a proteinogenic, non-proteinogenic or synthetic amino acid like ornithin or selenocystein
SQVSPFKIPIEELEDRVFVNCNTSIYRASSLSNCKHTSSVEX

SEQ ID NO: 3696 - protein, 42 aa, Artificial Sequence
  chemically synthesized
SQVSAFKIPIEELEDRVFVNCNTSIYRASSLSNCKHTSSVEE

SEQ ID NO: 3697 - protein, 42 aa, Artificial Sequence
  chemically synthesized
SQVSGFKIPIEELEDRVFVNCNTSIYRASSLSNCKHTSSVEE

SEQ ID NO: 3698 - protein, 42 aa, Artificial Sequence
  chemically synthesized
SQVSPFKIAIEELEDRVFVNCNTSIYRASSLSNCKHTSSVEE

SEQ ID NO: 3699 - protein, 42 aa, Artificial Sequence
  chemically synthesized
SQVSPFKIGIEELEDRVFVNCNTSIYRASSLSNCKHTSSVEE

SEQ ID NO: 3700 - protein, 42 aa, Artificial Sequence; identical to SEQ ID NO: 107
  chemically synthesized

SEQ ID NO: 3701 - protein, 42 aa, Artificial Sequence; identical to SEQ ID NO: 226
  chemically synthesized

SEQ ID NO: 3702 - protein, 42 aa, Artificial Sequence
  chemically synthesized
YQVSPFKIPIEELEDRVFVNCNTSIYRASSLSNCRHSSSVEE

SEQ ID NO: 3703 - protein, 42 aa, Artificial Sequence; identical to SEQ ID NO: 346
  chemically synthesized

SEQ ID NO: 3704 - protein, 42 aa, Artificial Sequence; identical to SEQ ID NO: 464
  chemically synthesized

SEQ ID NO: 3705 - protein, 42 aa, Artificial Sequence
  chemically synthesized
SQISPFKIPIEELEDRVFVNCNTSIYRASSLSNCRHSSSVEE

SEQ ID NO: 3706 - protein, 42 aa, Artificial Sequence
  chemically synthesized
SQPSPFKIPIEELEDRVFVNCNTSIYRASSLSNCRHSSSVEE

SEQ ID NO: 3707 - protein, 42 aa, Artificial Sequence
  chemically synthesized
SQFSPFKIPIEELEDRVFVNCNTSIYRASSLSNCRHSSSVEE

SEQ ID NO: 3708 - protein, 42 aa, Artificial Sequence; identical to SEQ ID NO: 583
  chemically synthesized

SEQ ID NO: 3709 - protein, 42 aa, Artificial Sequence
  chemically synthesized
SQVYPFKIPIEELEDRVFVNCNTSIYRASSLSNCRHSSSVEE

SEQ ID NO: 3710 - protein, 42 aa, Artificial Sequence
  chemically synthesized
SQVSPWKIPIEELEDRVFVNCNTSIYRASSLSNCRHSSSVEE

SEQ ID NO: 3711 - protein, 42 aa, Artificial Sequence
  chemically synthesized
SQVSPYKIPIEELEDRVFVNCNTSIYRASSLSNCRHSSSVEE

SEQ ID NO: 3712 - protein, 42 aa, Artificial Sequence
  chemically synthesized
SQVSPHKIPIEELEDRVFVNCNTSIYRASSLSNCRHSSSVEE

SEQ ID NO: 3713 - protein, 42 aa, Artificial Sequence
  chemically synthesized
SQVSPFRIPIEELEDRVFVNCNTSIYRASSLSNCRHSSSVEE

SEQ ID NO: 3714 - protein, 42 aa, Artificial Sequence
  chemically synthesized
SQVSPFHIPIEELEDRVFVNCNTSIYRASSLSNCRHSSSVEE

SEQ ID NO: 3715 - protein, 42 aa, Artificial Sequence
  chemically synthesized
  misc_feature (7)..(7): Xaa can be a proteinogenic, non-proteinogenic or synthetic amino acid like ornithin or selenocystein
SQVSPFXIPIEELEDRVFVNCNTSIYRASSLSNCRHSSSVEE

SEQ ID NO: 3716 - protein, 42 aa, Artificial Sequence; identical to SEQ ID NO: 822
  chemically synthesized

SEQ ID NO: 3717 - protein, 42 aa, Artificial Sequence
  chemically synthesized
SQVSPFKHPIEELEDRVFVNCNTSIYRASSLSNCRHSSSVEE

SEQ ID NO: 3718 - protein, 42 aa, Artificial Sequence
  chemically synthesized
SQVSPFKVPIEELEDRVFVNCNTSIYRASSLSNCRHSSSVEE

SEQ ID NO: 3719 - protein, 42 aa, Artificial Sequence
  chemically synthesized
SQVSPFKFPIEELEDRVFVNCNTSIYRASSLSNCRHSSSVEE

SEQ ID NO: 3720 - protein, 42 aa, Artificial Sequence
  chemically synthesized
SQVSPFKMPIEELEDRVFVNCNTSIYRASSLSNCRHSSSVEE

SEQ ID NO: 3721 - protein, 42 aa, Artificial Sequence; identical to SEQ ID NO: 940
  chemically synthesized

SEQ ID NO: 3722 - protein, 42 aa, Artificial Sequence
  chemically synthesized
SQVSPFKIPHEELEDRVFVNCNTSIYRASSLSNCRHSSSVEE

SEQ ID NO: 3723 - protein, 42 aa, Artificial Sequence
  chemically synthesized
SQVSPFKIPVEELEDRVFVNCNTSIYRASSLSNCRHSSSVEE

SEQ ID NO: 3724 - protein, 42 aa, Artificial Sequence
  chemically synthesized
SQVSPFKIPFEELEDRVFVNCNTSIYRASSLSNCRHSSSVEE

SEQ ID NO: 3725 - protein, 42 aa, Artificial Sequence
  chemically synthesized
SQVSPFKIPMEELEDRVFVNCNTSIYRASSLSNCRHSSSVEE

SEQ ID NO: 3726 - protein, 42 aa, Artificial Sequence; identical to SEQ ID NO: 1060
  chemically synthesized

SEQ ID NO: 3727 - protein, 42 aa, Artificial Sequence
  chemically synthesized
  misc_feature (11)..(11): Xaa can be a proteinogenic, non-proteinogenic or synthetic amino acid like ornithin or selenocystein
SQVSPFKIPIXELEDRVFVNCNTSIYRASSLSNCRHSSSVEE

SEQ ID NO: 3728 - protein, 42 aa, Artificial Sequence; identical to SEQ ID NO: 1180
  chemically synthesized

SEQ ID NO: 3729 - protein, 42 aa, Artificial Sequence
  chemically synthesized
  misc_feature (12)..(12): Xaa can be a proteinogenic, non-proteinogenic or synthetic amino acid like ornithin or selenocystein
SQVSPFKIPIEXLEDRVFVNCNTSIYRASSLSNCRHSSSVEE

SEQ ID NO: 3730 - protein, 42 aa, Artificial Sequence
  chemically synthesized
SQVSPFKIPIEEVEDRVFVNCNTSIYRASSLSNCRHSSSVEE

SEQ ID NO: 3731 - protein, 42 aa, Artificial Sequence; identical to SEQ ID NO: 1297
  chemically synthesized

SEQ ID NO: 3732 - protein, 42 aa, Artificial Sequence
  chemically synthesized
SQVSPFKIPIEEFEDRVFVNCNTSIYRASSLSNCRHSSSVEE

SEQ ID NO: 3733 - protein, 42 aa, Artificial Sequence
  chemically synthesized
SQVSPFKIPIEEHEDRVFVNCNTSIYRASSLSNCRHSSSVEE

SEQ ID NO: 3734 - protein, 42 aa, Artificial Sequence
  chemically synthesized
SQVSPFKIPIEEMEDRVFVNCNTSIYRASSLSNCRHSSSVEE

SEQ ID NO: 3735 - protein, 42 aa, Artificial Sequence; identical to SEQ ID NO: 1417
  chemically synthesized

SEQ ID NO: 3736 - protein, 42 aa, Artificial Sequence
  chemically synthesized
  misc_feature (14)..(14): Xaa can be a proteinogenic, non-proteinogenic or synthetic amino acid like ornithin or selenocystein
SQVSPFKIPIEELXDRVFVNCNTSIYRASSLSNCRHSSSVEE

SEQ ID NO: 3737 - protein, 42 aa, Artificial Sequence
  chemically synthesized
  misc_feature (15)..(15): Xaa can be a proteinogenic, non-proteinogenic or synthetic amino acid like ornithin or selenocystein
SQVSPFKIPIEELEXRVFVNCNTSIYRASSLSNCRHSSSVEE

SEQ ID NO: 3738 - protein, 42 aa, Artificial Sequence
  chemically synthesized
SQVSPFKIPIEELEERVFVNCNTSIYRASSLSNCRHSSSVEE

SEQ ID NO: 3739 - protein, 42 aa, Artificial Sequence; identical to SEQ ID NO: 1536
  chemically synthesized

SEQ ID NO: 3740 - protein, 42 aa, Artificial Sequence
  chemically synthesized
SQVSPFKIPIEELEDHVFVNCNTSIYRASSLSNCRHSSSVEE

SEQ ID NO: 3741 - protein, 42 aa, Artificial Sequence
  chemically synthesized
  misc_feature (16)..(16): Xaa can be a proteinogenic, non-proteinogenic or synthetic amino acid like ornithin or selenocystein
SQVSPFKIPIEELEDXVFVNCNTSIYRASSLSNCRHSSSVEE

SEQ ID NO: 3742 - protein, 42 aa, Artificial Sequence; identical to SEQ ID NO: 1653
  chemically synthesized

SEQ ID NO: 3743 - protein, 42 aa, Artificial Sequence
  chemically synthesized
SQVSPFKIPIEELEDRLFVNCNTSIYRASSLSNCRHSSSVEE

SEQ ID NO: 3744 - protein, 42 aa, Artificial Sequence
  chemically synthesized
SQVSPFKIPIEELEDRFFVNCNTSIYRASSLSNCRHSSSVEE

SEQ ID NO: 3745 - protein, 42 aa, Artificial Sequence
  chemically synthesized
SQVSPFKIPIEELEDRHFVNCNTSIYRASSLSNCRHSSSVEE

SEQ ID NO: 3746 - protein, 42 aa, Artificial Sequence
  chemically synthesized
SQVSPFKIPIEELEDRMFVNCNTSIYRASSLSNCRHSSSVEE

SEQ ID NO: 3747 - protein, 42 aa, Artificial Sequence; identical to SEQ ID NO: 1770
  chemically synthesized

SEQ ID NO: 3748 - protein, 42 aa, Artificial Sequence
  chemically synthesized
SQVSPFKIPIEELEDRVLVNCNTSIYRASSLSNCRHSSSVEE

SEQ ID NO: 3749 - protein, 42 aa, Artificial Sequence
  chemically synthesized
SQVSPFKIPIEELEDRVVVNCNTSIYRASSLSNCRHSSSVEE

SEQ ID NO: 3750 - protein, 42 aa, Artificial Sequence
  chemically synthesized
SQVSPFKIPIEELEDRVHVNCNTSIYRASSLSNCRHSSSVEE

SEQ ID NO: 3751 - protein, 42 aa, Artificial Sequence
  chemically synthesized
SQVSPFKIPIEELEDRVMVNCNTSIYRASSLSNCRHSSSVEE

SEQ ID NO: 3752 - protein, 42 aa, Artificial Sequence; identical to SEQ ID NO: 1887
  chemically synthesized

SEQ ID NO: 3753 - protein, 42 aa, Artificial Sequence
  chemically synthesized
SQVSPFKIPIEELEDRVFLNCNTSIYRASSLSNCRHSSSVEE

SEQ ID NO: 3754 - protein, 42 aa, Artificial Sequence
  chemically synthesized
SQVSPFKIPIEELEDRVFFNCNTSIYRASSLSNCRHSSSVEE

SEQ ID NO: 3755 - protein, 42 aa, Artificial Sequence
  chemically synthesized
SQVSPFKIPIEELEDRVFHNCNTSIYRASSLSNCRHSSSVEE

SEQ ID NO: 3756 - protein, 42 aa, Artificial Sequence
  chemically synthesized
SQVSPFKIPIEELEDRVFMNCNTSIYRASSLSNCRHSSSVEE

SEQ ID NO: 3757 - protein, 42 aa, Artificial Sequence; identical to SEQ ID NO: 2008
  chemically synthesized

SEQ ID NO: 3758 - protein, 42 aa, Artificial Sequence
  chemically synthesized
SQVSPFKIPIEELEDRVFVNSNTSIYRASSLSNCRHSSSVEE

SEQ ID NO: 3759 - protein, 42 aa, Artificial Sequence
  chemically synthesized
SQVSPFKIPIEELEDRVFVNGNTSIYRASSLSNCRHSSSVEE

SEQ ID NO: 3760 - protein, 42 aa, Artificial Sequence
  chemically synthesized
SQVSPFKIPIEELEDRVFVNANTSIYRASSLSNCRHSSSVEE

SEQ ID NO: 3761 - protein, 42 aa, Artificial Sequence; identical to SEQ ID NO: 2249
  chemically synthesized

SEQ ID NO: 3762 - protein, 42 aa, Artificial Sequence; identical to SEQ ID NO: 2369
  chemically synthesized

SEQ ID NO: 3763 - protein, 42 aa, Artificial Sequence
  chemically synthesized
SQVSPFKIPIEELEDRVFVNCNYSIYRASSLSNCRHSSSVEE

SEQ ID NO: 3764 - protein, 42 aa, Artificial Sequence; identical to SEQ ID NO: 2489
  chemically synthesized

SEQ ID NO: 3765 - protein, 42 aa, Artificial Sequence
  chemically synthesized
SQVSPFKIPIEELEDRVFVNCNTYIYRASSLSNCRHSSSVEE

SEQ ID NO: 3766 - protein, 42 aa, Artificial Sequence
  chemically synthesized
SQVSPFKIPIEELEDRVFVNCNTSVYRASSLSNCRHSSSVEE

SEQ ID NO: 3767 - protein, 42 aa, Artificial Sequence; identical to SEQ ID NO: 2606
  chemically synthesized

SEQ ID NO: 3768 - protein, 42 aa, Artificial Sequence
  chemically synthesized
SQVSPFKIPIEELEDRVFVNCNTSHYRASSLSNCRHSSSVEE

SEQ ID NO: 3769 - protein, 42 aa, Artificial Sequence
  chemically synthesized
SQVSPFKIPIEELEDRVFVNCNTSFYRASSLSNCRHSSSVEE

SEQ ID NO: 3770 - protein, 42 aa, Artificial Sequence
  chemically synthesized
SQVSPFKIPIEELEDRVFVNCNTSMYRASSLSNCRHSSSVEE

SEQ ID NO: 3771 - protein, 42 aa, Artificial Sequence
  chemically synthesized
SQVSPFKIPIEELEDRVFVNCNTSIWRASSLSNCRHSSSVEE

SEQ ID NO: 3772 - protein, 42 aa, Artificial Sequence
  chemically synthesized
SQVSPFKIPIEELEDRVFVNCNTSIFRASSLSNCRHSSSVEE

SEQ ID NO: 3773 - protein, 42 aa, Artificial Sequence
  chemically synthesized
SQVSPFKIPIEELEDRVFVNCNTSISRASSLSNCRHSSSVEE

SEQ ID NO: 3774 - protein, 42 aa, Artificial Sequence; identical to SEQ ID NO: 2724
  chemically synthesized

SEQ ID NO: 3775 - protein, 42 aa, Artificial Sequence
  chemically synthesized
  misc_feature (27)..(27): Xaa can be a proteinogenic, non-proteinogenic or synthetic amino acid like ornithin or selenocystein
SQVSPFKIPIEELEDRVFVNCNTSIYXASSLSNCRHSSSVEE

SEQ ID NO: 3776 - protein, 42 aa, Artificial Sequence
  chemically synthesized
SQVSPFKIPIEELEDRVFVNCNTSIYHASSLSNCRHSSSVEE

SEQ ID NO: 3777 - protein, 42 aa, Artificial Sequence; identical to SEQ ID NO: 2843
  chemically synthesized

SEQ ID NO: 3778 - protein, 42 aa, Artificial Sequence; identical to SEQ ID NO: 2964
  chemically synthesized

SEQ ID NO: 3779 - protein, 42 aa, Artificial Sequence; identical to SEQ ID NO: 3084
  chemically synthesized

SEQ ID NO: 3780 - protein, 42 aa, Artificial Sequence
  chemically synthesized
SQVSPFKIPIEELEDRVFVNCNTSIYRAYSLSNCRHSSSVEE

SEQ ID NO: 3781 - protein, 42 aa, Artificial Sequence; identical to SEQ ID NO: 3204
  chemically synthesized

SEQ ID NO: 3782 - protein, 42 aa, Artificial Sequence
  chemically synthesized
SQVSPFKIPIEELEDRVFVNCNTSIYRASYLSNCRHSSSVEE

SEQ ID NO: 3783 - protein, 42 aa, Artificial Sequence; identical to SEQ ID NO: 3321
  chemically synthesized

SEQ ID NO: 3784 - protein, 42 aa, Artificial Sequence
  chemically synthesized
SQVSPFKIPIEELEDRVFVNCNTSIYRASSVSNCRHSSSVEE

SEQ ID NO: 3785 - protein, 42 aa, Artificial Sequence
  chemically synthesized
SQVSPFKIPIEELEDRVFVNCNTSIYRASSFSNCRHSSSVEE

SEQ ID NO: 3786 - protein, 42 aa, Artificial Sequence
  chemically synthesized
SQVSPFKIPIEELEDRVFVNCNTSIYRASSMSNCRHSSSVEE

SEQ ID NO: 3787 - protein, 42 aa, Artificial Sequence
  chemically synthesized
SQVSPFKIPIEELEDRVFVNCNTSIYRASSHSNCRHSSSVEE

SEQ ID NO: 3788 - protein, 42 aa, Artificial Sequence; identical to SEQ ID NO: 3441
  chemically synthesized

SEQ ID NO: 3789 - protein, 42 aa, Artificial Sequence
  chemically synthesized
SQVSPFKIPIEELEDRVFVNCNTSIYRASSLYNCRHSSSVEE

SEQ ID NO: 3790 - protein, 42 aa, Artificial Sequence; identical to SEQ ID NO: 3562
  chemically synthesized

SEQ ID NO: 3791 - protein, 42 aa, Artificial Sequence
  chemically synthesized
SQVSPFKIPIEELEDRVFVNCNTSIYRASSLSNSRHSSSVEE

SEQ ID NO: 3792 - protein, 42 aa, Artificial Sequence
  chemically synthesized
SQVSPFKIPIEELEDRVFVNCNTSIYRASSLSNGRHSSSVEE

SEQ ID NO: 3793 - protein, 42 aa, Artificial Sequence
  chemically synthesized
SQVSPFKIPIEELEDRVFVNCNTSIYRASSLSNARHSSSVEE

SEQ ID NO: 3794 - protein, 42 aa, Artificial Sequence
  chemically synthesized
  misc_feature (35)..(35): Xaa can be a proteinogenic, non-proteinogenic or synthetic amino acid like ornithin or selenocystein
SQVSPFKIPIEELEDRVFVNCNTSIYRASSLSNCXHSSSVEE

SEQ ID NO: 3795 - protein, 42 aa, Artificial Sequence
  chemically synthesized
SQVSPFKIPIEELEDRVFVNCNTSIYRASSLSNCHHSSSVEE

SEQ ID NO: 3796 - protein, 42 aa, Artificial Sequence; identical to SEQ ID NO: 3681
  chemically synthesized

SEQ ID NO: 3797 - protein, 42 aa, Artificial Sequence
  chemically synthesized
SQVSPFKIPIEELEDRVFVNCNTSIYRASSLSNCRGSSSVEE

SEQ ID NO: 3798 - protein, 42 aa, Artificial Sequence
  chemically synthesized
SQVSPFKIPIEELEDRVFVNCNTSIYRASSLSNCRASSSVEE

SEQ ID NO: 3799 - protein, 42 aa, Artificial Sequence
  chemically synthesized
SQVSPFKIPIEELEDRVFVNCNTSIYRASSLSNCRISSSVEE

SEQ ID NO: 3800 - protein, 42 aa, Artificial Sequence
  chemically synthesized
SQVSPFKIPIEELEDRVFVNCNTSIYRASSLSNCRLSSSVEE

SEQ ID NO: 3801 - protein, 42 aa, Artificial Sequence
  chemically synthesized
SQVSPFKIPIEELEDRVFVNCNTSIYRASSLSNCRMSSSVEE

SEQ ID NO: 3802 - protein, 42 aa, Artificial Sequence
  chemically synthesized
SQVSPFKIPIEELEDRVFVNCNTSIYRASSLSNCRVSSSVEE

SEQ ID NO: 3803 - protein, 42 aa, Artificial Sequence
  chemically synthesized
SQVSPFKIPIEELEDRVFVNCNTSIYRASSLSNCRHSTSVEE

SEQ ID NO: 3804 - protein, 42 aa, Artificial Sequence
  chemically synthesized
SQVSPFKIPIEELEDRVFVNCNTSIYRASSLSNCRHSYSVEE

SEQ ID NO: 3805 - protein, 42 aa, Artificial Sequence
  chemically synthesized
SQVSPFKIPIEELEDRVFVNCNTSIYRASSLSNCRHSSTVEE

SEQ ID NO: 3806 - protein, 42 aa, Artificial Sequence
  chemically synthesized
SQVSPFKIPIEELEDRVFVNCNTSIYRASSLSNCRHSSYVEE

SEQ ID NO: 3807 - protein, 42 aa, Artificial Sequence
  chemically synthesized
SQVSPFKIPIEELEDRVFVNCNTSIYRASSLSNCRHSSSIEE

SEQ ID NO: 3808 - protein, 42 aa, Artificial Sequence
  chemically synthesized
SQVSPFKIPIEELEDRVFVNCNTSIYRASSLSNCRHSSSLEE

SEQ ID NO: 3809 - protein, 42 aa, Artificial Sequence
  chemically synthesized
SQVSPFKIPIEELEDRVFVNCNTSIYRASSLSNCRHSSSFEE

SEQ ID NO: 3810 - protein, 42 aa, Artificial Sequence
  chemically synthesized
SQVSPFKIPIEELEDRVFVNCNTSIYRASSLSNCRHSSSHEE

SEQ ID NO: 3811 - protein, 42 aa, Artificial Sequence
  chemically synthesized
SQVSPFKIPIEELEDRVFVNCNTSIYRASSLSNCRHSSSMEE

SEQ ID NO: 3812 - protein, 42 aa, Artificial Sequence
  chemically synthesized
SQVSPFKIPIEELEDRVFVNCNTSIYRASSLSNCRHSSSVDE

SEQ ID NO: 3813 - protein, 42 aa, Artificial Sequence
  chemically synthesized
  misc_feature (41)..(41): Xaa can be a proteinogenic, non-proteinogenic or synthetic amino acid like ornithin or selenocystein
SQVSPFKIPIEELEDRVFVNCNTSIYRASSLSNCRHSSSVXE

SEQ ID NO: 3814 - protein, 42 aa, Artificial Sequence
  chemically synthesized
SQVSPFKIPIEELEDRVFVNCNTSIYRASSLSNCRHSSSVED

SEQ ID NO: 3815 - protein, 42 aa, Artificial Sequence
  chemically synthesized
  misc_feature (42)..(42): Xaa can be a proteinogenic, non-proteinogenic or synthetic amino acid like ornithin or selenocystein
SQVSPFKIPIEELEDRVFVNCNTSIYRASSLSNCRHSSSVEX

SEQ ID NO: 3816 - protein, 42 aa, Artificial Sequence
  chemically synthesized
SQVSAFKIPIEELEDRVFVNCNTSIYRASSLSNCRHSSSVEE

SEQ ID NO: 3817 - protein, 42 aa, Artificial Sequence
  chemically synthesized
SQVSGFKIPIEELEDRVFVNCNTSIYRASSLSNCRHSSSVEE

SEQ ID NO: 3818 - protein, 42 aa, Artificial Sequence
  chemically synthesized
SQVSPFKIAIEELEDRVFVNCNTSIYRASSLSNCRHSSSVEE

SEQ ID NO: 3819 - protein, 42 aa, Artificial Sequence
  chemically synthesized
SQVSPFKIGIEELEDRVFVNCNTSIYRASSLSNCRHSSSVEE

SEQ ID NO: 3820 - protein, 42 aa, Artificial Sequence; identical to SEQ ID NO: 109
  chemically synthesized

SEQ ID NO: 3821 - protein, 42 aa, Artificial Sequence; identical to SEQ ID NO: 228
  chemically synthesized

SEQ ID NO: 3822 - protein, 42 aa, Artificial Sequence
  chemically synthesized
YQVSPFKIPIEELEDRVFVNCNTSIYRASSLSNCRHTTSVEE

SEQ ID NO: 3823 - protein, 42 aa, Artificial Sequence; identical to SEQ ID NO: 348
  chemically synthesized

SEQ ID NO: 3824 - protein, 42 aa, Artificial Sequence; identical to SEQ ID NO: 466
  chemically synthesized

SEQ ID NO: 3825 - protein, 42 aa, Artificial Sequence
  chemically synthesized
SQISPFKIPIEELEDRVFVNCNTSIYRASSLSNCRHTTSVEE

SEQ ID NO: 3826 - protein, 42 aa, Artificial Sequence
  chemically synthesized
SQPSPFKIPIEELEDRVFVNCNTSIYRASSLSNCRHTTSVEE

SEQ ID NO: 3827 - protein, 42 aa, Artificial Sequence
  chemically synthesized
SQFSPFKIPIEELEDRVFVNCNTSIYRASSLSNCRHTTSVEE

SEQ ID NO: 3828 - protein, 42 aa, Artificial Sequence; identical to SEQ ID NO: 585
  chemically synthesized

SEQ ID NO: 3829 - protein, 42 aa, Artificial Sequence
  chemically synthesized
SQVYPFKIPIEELEDRVFVNCNTSIYRASSLSNCRHTTSVEE

SEQ ID NO: 3830 - protein, 42 aa, Artificial Sequence
  chemically synthesized
SQVSPWKIPIEELEDRVFVNCNTSIYRASSLSNCRHTTSVEE

SEQ ID NO: 3831 - protein, 42 aa, Artificial Sequence
  chemically synthesized
SQVSPYKIPIEELEDRVFVNCNTSIYRASSLSNCRHTTSVEE

SEQ ID NO: 3832 - protein, 42 aa, Artificial Sequence
  chemically synthesized
SQVSPHKIPIEELEDRVFVNCNTSIYRASSLSNCRHTTSVEE

SEQ ID NO: 3833 - protein, 42 aa, Artificial Sequence
  chemically synthesized
SQVSPFRIPIEELEDRVFVNCNTSIYRASSLSNCRHTTSVEE

SEQ ID NO: 3834 - protein, 42 aa, Artificial Sequence
  chemically synthesized
SQVSPFHIPIEELEDRVFVNCNTSIYRASSLSNCRHTTSVEE

SEQ ID NO: 3835 - protein, 42 aa, Artificial Sequence
  chemically synthesized
  misc_feature (7)..(7): Xaa can be a proteinogenic, non-proteinogenic or synthetic amino acid like ornithin or selenocystein
SQVSPFXIPIEELEDRVFVNCNTSIYRASSLSNCRHTTSVEE

SEQ ID NO: 3836 - protein, 42 aa, Artificial Sequence; identical to SEQ ID NO: 824
  chemically synthesized

SEQ ID NO: 3837 - protein, 42 aa, Artificial Sequence
  chemically synthesized
SQVSPFKHPIEELEDRVFVNCNTSIYRASSLSNCRHTTSVEE

SEQ ID NO: 3838 - protein, 42 aa, Artificial Sequence
  chemically synthesized
SQVSPFKVPIEELEDRVFVNCNTSIYRASSLSNCRHTTSVEE

SEQ ID NO: 3839 - protein, 42 aa, Artificial Sequence
  chemically synthesized
SQVSPFKFPIEELEDRVFVNCNTSIYRASSLSNCRHTTSVEE

SEQ ID NO: 3840 - protein, 42 aa, Artificial Sequence
  chemically synthesized
SQVSPFKMPIEELEDRVFVNCNTSIYRASSLSNCRHTTSVEE

SEQ ID NO: 3841 - protein, 42 aa, Artificial Sequence; identical to SEQ ID NO: 942
  chemically synthesized

SEQ ID NO: 3842 - protein, 42 aa, Artificial Sequence
  chemically synthesized
SQVSPFKIPHEELEDRVFVNCNTSIYRASSLSNCRHTTSVEE

SEQ ID NO: 3843 - protein, 42 aa, Artificial Sequence
  chemically synthesized
SQVSPFKIPVEELEDRVFVNCNTSIYRASSLSNCRHTTSVEE

SEQ ID NO: 3844 - protein, 42 aa, Artificial Sequence
  chemically synthesized
SQVSPFKIPFEELEDRVFVNCNTSIYRASSLSNCRHTTSVEE

SEQ ID NO: 3845 - protein, 42 aa, Artificial Sequence
  chemically synthesized
SQVSPFKIPMEELEDRVFVNCNTSIYRASSLSNCRHTTSVEE

SEQ ID NO: 3846 - protein, 42 aa, Artificial Sequence; identical to SEQ ID NO: 1062
  chemically synthesized

SEQ ID NO: 3847 - protein, 42 aa, Artificial Sequence
  chemically synthesized
  misc_feature (11)..(11): Xaa can be a proteinogenic, non-proteinogenic or synthetic amino acid like ornithin or selenocystein
SQVSPFKIPIXELEDRVFVNCNTSIYRASSLSNCRHTTSVEE

SEQ ID NO: 3848 - protein, 42 aa, Artificial Sequence; identical to SEQ ID NO: 1182
  chemically synthesized

SEQ ID NO: 3849 - protein, 42 aa, Artificial Sequence
  chemically synthesized
  misc_feature (12)..(12): Xaa can be a proteinogenic, non-proteinogenic or synthetic amino acid like ornithin or selenocystein
SQVSPFKIPIEXLEDRVFVNCNTSIYRASSLSNCRHTTSVEE

SEQ ID NO: 3850 - protein, 42 aa, Artificial Sequence
  chemically synthesized
SQVSPFKIPIEEVEDRVFVNCNTSIYRASSLSNCRHTTSVEE

SEQ ID NO: 3851 - protein, 42 aa, Artificial Sequence; identical to SEQ ID NO: 1299
  chemically synthesized

SEQ ID NO: 3852 - protein, 42 aa, Artificial Sequence
  chemically synthesized
SQVSPFKIPIEEFEDRVFVNCNTSIYRASSLSNCRHTTSVEE

SEQ ID NO: 3853 - protein, 42 aa, Artificial Sequence
  chemically synthesized
SQVSPFKIPIEEHEDRVFVNCNTSIYRASSLSNCRHTTSVEE

SEQ ID NO: 3854 - protein, 42 aa, Artificial Sequence
  chemically synthesized
SQVSPFKIPIEEMEDRVFVNCNTSIYRASSLSNCRHTTSVEE

SEQ ID NO: 3855 - protein, 42 aa, Artificial Sequence; identical to SEQ ID NO: 1419
  chemically synthesized

SEQ ID NO: 3856 - protein, 42 aa, Artificial Sequence
  chemically synthesized
  misc_feature (14)..(14): Xaa can be a proteinogenic, non-proteinogenic or synthetic amino acid like ornithin or selenocystein
SQVSPFKIPIEELXDRVFVNCNTSIYRASSLSNCRHTTSVEE

SEQ ID NO: 3857 - protein, 42 aa, Artificial Sequence
  chemically synthesized
  misc_feature (15)..(15): Xaa can be a proteinogenic, non-proteinogenic or synthetic amino acid like ornithin or selenocystein
SQVSPFKIPIEELEXRVFVNCNTSIYRASSLSNCRHTTSVEE

SEQ ID NO: 3858 - protein, 42 aa, Artificial Sequence
  chemically synthesized
SQVSPFKIPIEELEERVFVNCNTSIYRASSLSNCRHTTSVEE

SEQ ID NO: 3859 - protein, 42 aa, Artificial Sequence; identical to SEQ ID NO: 1538
  chemically synthesized

SEQ ID NO: 3860 - protein, 42 aa, Artificial Sequence
  chemically synthesized
SQVSPFKIPIEELEDHVFVNCNTSIYRASSLSNCRHTTSVEE

SEQ ID NO: 3861 - protein, 42 aa, Artificial Sequence
  chemically synthesized
  misc_feature (16)..(16): Xaa can be a proteinogenic, non-proteinogenic or synthetic amino acid like ornithin or selenocystein
SQVSPFKIPIEELEDXVFVNCNTSIYRASSLSNCRHTTSVEE

SEQ ID NO: 3862 - protein, 42 aa, Artificial Sequence; identical to SEQ ID NO: 1655
  chemically synthesized

SEQ ID NO: 3863 - protein, 42 aa, Artificial Sequence
  chemically synthesized
SQVSPFKIPIEELEDRLFVNCNTSIYRASSLSNCRHTTSVEE

SEQ ID NO: 3864 - protein, 42 aa, Artificial Sequence
  chemically synthesized
SQVSPFKIPIEELEDRFFVNCNTSIYRASSLSNCRHTTSVEE

SEQ ID NO: 3865 - protein, 42 aa, Artificial Sequence
  chemically synthesized
SQVSPFKIPIEELEDRHFVNCNTSIYRASSLSNCRHTTSVEE

SEQ ID NO: 3866 - protein, 42 aa, Artificial Sequence
  chemically synthesized
SQVSPFKIPIEELEDRMFVNCNTSIYRASSLSNCRHTTSVEE

SEQ ID NO: 3867 - protein, 42 aa, Artificial Sequence; identical to SEQ ID NO: 1772
  chemically synthesized

SEQ ID NO: 3868 - protein, 42 aa, Artificial Sequence
  chemically synthesized
SQVSPFKIPIEELEDRVLVNCNTSIYRASSLSNCRHTTSVEE

SEQ ID NO: 3869 - protein, 42 aa, Artificial Sequence
  chemically synthesized
SQVSPFKIPIEELEDRVVVNCNTSIYRASSLSNCRHTTSVEE

SEQ ID NO: 3870 - protein, 42 aa, Artificial Sequence
  chemically synthesized
SQVSPFKIPIEELEDRVHVNCNTSIYRASSLSNCRHTTSVEE

SEQ ID NO: 3871 - protein, 42 aa, Artificial Sequence
  chemically synthesized
SQVSPFKIPIEELEDRVMVNCNTSIYRASSLSNCRHTTSVEE

SEQ ID NO: 3872 - protein, 42 aa, Artificial Sequence; identical to SEQ ID NO: 1889
  chemically synthesized

SEQ ID NO: 3873 - protein, 42 aa, Artificial Sequence
  chemically synthesized
SQVSPFKIPIEELEDRVFLNCNTSIYRASSLSNCRHTTSVEE

SEQ ID NO: 3874 - protein, 42 aa, Artificial Sequence
  chemically synthesized
SQVSPFKIPIEELEDRVFFNCNTSIYRASSLSNCRHTTSVEE

SEQ ID NO: 3875 - protein, 42 aa, Artificial Sequence
  chemically synthesized
SQVSPFKIPIEELEDRVFHNCNTSIYRASSLSNCRHTTSVEE

SEQ ID NO: 3876 - protein, 42 aa, Artificial Sequence
  chemically synthesized
SQVSPFKIPIEELEDRVFMNCNTSIYRASSLSNCRHTTSVEE

SEQ ID NO: 3877 - protein, 42 aa, Artificial Sequence; identical to SEQ ID NO: 2010
  chemically synthesized

SEQ ID NO: 3878 - protein, 42 aa, Artificial Sequence
  chemically synthesized
SQVSPFKIPIEELEDRVFVNSNTSIYRASSLSNCRHTTSVEE

SEQ ID NO: 3879 - protein, 42 aa, Artificial Sequence
  chemically synthesized
SQVSPFKIPIEELEDRVFVNGNTSIYRASSLSNCRHTTSVEE

SEQ ID NO: 3880 - protein, 42 aa, Artificial Sequence
  chemically synthesized
SQVSPFKIPIEELEDRVFVNANTSIYRASSLSNCRHTTSVEE

SEQ ID NO: 3881 - protein, 42 aa, Artificial Sequence; identical to SEQ ID NO: 2251
  chemically synthesized

SEQ ID NO: 3882 - protein, 42 aa, Artificial Sequence; identical to SEQ ID NO: 2371
  chemically synthesized

SEQ ID NO: 3883 - protein, 42 aa, Artificial Sequence
  chemically synthesized
SQVSPFKIPIEELEDRVFVNCNYSIYRASSLSNCRHTTSVEE

SEQ ID NO: 3884 - protein, 42 aa, Artificial Sequence; identical to SEQ ID NO: 2491
  chemically synthesized

SEQ ID NO: 3885 - protein, 42 aa, Artificial Sequence
  chemically synthesized
SQVSPFKIPIEELEDRVFVNCNTYIYRASSLSNCRHTTSVEE

SEQ ID NO: 3886 - protein, 42 aa, Artificial Sequence
  chemically synthesized
SQVSPFKIPIEELEDRVFVNCNTSVYRASSLSNCRHTTSVEE

SEQ ID NO: 3887 - protein, 42 aa, Artificial Sequence; identical to SEQ ID NO: 2608
  chemically synthesized

SEQ ID NO: 3888 - protein, 42 aa, Artificial Sequence
  chemically synthesized
SQVSPFKIPIEELEDRVFVNCNTSHYRASSLSNCRHTTSVEE

SEQ ID NO: 3889 - protein, 42 aa, Artificial Sequence
  chemically synthesized
SQVSPFKIPIEELEDRVFVNCNTSFYRASSLSNCRHTTSVEE

SEQ ID NO: 3890 - protein, 42 aa, Artificial Sequence
  chemically synthesized
SQVSPFKIPIEELEDRVFVNCNTSMYRASSLSNCRHTTSVEE

SEQ ID NO: 3891 - protein, 42 aa, Artificial Sequence
  chemically synthesized
SQVSPFKIPIEELEDRVFVNCNTSIWRASSLSNCRHTTSVEE

SEQ ID NO: 3892 - protein, 42 aa, Artificial Sequence
  chemically synthesized
SQVSPFKIPIEELEDRVFVNCNTSIFRASSLSNCRHTTSVEE

SEQ ID NO: 3893 - protein, 42 aa, Artificial Sequence
  chemically synthesized
SQVSPFKIPIEELEDRVFVNCNTSISRASSLSNCRHTTSVEE

SEQ ID NO: 3894 - protein, 42 aa, Artificial Sequence; identical to SEQ ID NO: 2726
  chemically synthesized

SEQ ID NO: 3895 - protein, 42 aa, Artificial Sequence
  chemically synthesized
  misc_feature (27)..(27): Xaa can be a proteinogenic, non-proteinogenic or synthetic amino acid like ornithin or selenocystein
SQVSPFKIPIEELEDRVFVNCNTSIYXASSLSNCRHTTSVEE

SEQ ID NO: 3896 - protein, 42 aa, Artificial Sequence
  chemically synthesized
SQVSPFKIPIEELEDRVFVNCNTSIYHASSLSNCRHTTSVEE

SEQ ID NO: 3897 - protein, 42 aa, Artificial Sequence; identical to SEQ ID NO: 2845
  chemically synthesized

SEQ ID NO: 3898 - protein, 42 aa, Artificial Sequence; identical to SEQ ID NO: 2966
  chemically synthesized

SEQ ID NO: 3899 - protein, 42 aa, Artificial Sequence; identical to SEQ ID NO: 3086
  chemically synthesized

SEQ ID NO: 3900 - protein, 42 aa, Artificial Sequence
  chemically synthesized
SQVSPFKIPIEELEDRVFVNCNTSIYRAYSLSNCRHTTSVEE

SEQ ID NO: 3901 - protein, 42 aa, Artificial Sequence; identical to SEQ ID NO: 3206
  chemically synthesized

SEQ ID NO: 3902 - protein, 42 aa, Artificial Sequence
  chemically synthesized
SQVSPFKIPIEELEDRVFVNCNTSIYRASYLSNCRHTTSVEE

SEQ ID NO: 3903 - protein, 42 aa, Artificial Sequence; identical to SEQ ID NO: 3323
  chemically synthesized

SEQ ID NO: 3904 - protein, 42 aa, Artificial Sequence
  chemically synthesized
SQVSPFKIPIEELEDRVFVNCNTSIYRASSVSNCRHTTSVEE

SEQ ID NO: 3905 - protein, 42 aa, Artificial Sequence
  chemically synthesized
SQVSPFKIPIEELEDRVFVNCNTSIYRASSFSNCRHTTSVEE

SEQ ID NO: 3906 - protein, 42 aa, Artificial Sequence
  chemically synthesized
SQVSPFKIPIEELEDRVFVNCNTSIYRASSMSNCRHTTSVEE

SEQ ID NO: 3907 - protein, 42 aa, Artificial Sequence
  chemically synthesized
SQVSPFKIPIEELEDRVFVNCNTSIYRASSHSNCRHTTSVEE

SEQ ID NO: 3908 - protein, 42 aa, Artificial Sequence; identical to SEQ ID NO: 3443
  chemically synthesized

SEQ ID NO: 3909 - protein, 42 aa, Artificial Sequence
  chemically synthesized
SQVSPFKIPIEELEDRVFVNCNTSIYRASSLYNCRHTTSVEE

SEQ ID NO: 3910 - protein, 42 aa, Artificial Sequence; identical to SEQ ID NO: 3564
  chemically synthesized

SEQ ID NO: 3911 - protein, 42 aa, Artificial Sequence
  chemically synthesized
SQVSPFKIPIEELEDRVFVNCNTSIYRASSLSNSRHTTSVEE

SEQ ID NO: 3912 - protein, 42 aa, Artificial Sequence
  chemically synthesized
SQVSPFKIPIEELEDRVFVNCNTSIYRASSLSNGRHTTSVEE

SEQ ID NO: 3913 - protein, 42 aa, Artificial Sequence
  chemically synthesized
SQVSPFKIPIEELEDRVFVNCNTSIYRASSLSNARHTTSVEE

SEQ ID NO: 3914 - protein, 42 aa, Artificial Sequence
  chemically synthesized
  misc_feature (35)..(35): Xaa can be a proteinogenic, non-proteinogenic or synthetic amino acid like ornithin or selenocystein
SQVSPFKIPIEELEDRVFVNCNTSIYRASSLSNCXHTTSVEE

SEQ ID NO: 3915 - protein, 42 aa, Artificial Sequence
  chemically synthesized
SQVSPFKIPIEELEDRVFVNCNTSIYRASSLSNCHHTTSVEE

SEQ ID NO: 3916 - protein, 42 aa, Artificial Sequence; identical to SEQ ID NO: 3683
  chemically synthesized

SEQ ID NO: 3917 - protein, 42 aa, Artificial Sequence
  chemically synthesized
SQVSPFKIPIEELEDRVFVNCNTSIYRASSLSNCRGTTSVEE

SEQ ID NO: 3918 - protein, 42 aa, Artificial Sequence
  chemically synthesized
SQVSPFKIPIEELEDRVFVNCNTSIYRASSLSNCRATTSVEE

SEQ ID NO: 3919 - protein, 42 aa, Artificial Sequence
  chemically synthesized
SQVSPFKIPIEELEDRVFVNCNTSIYRASSLSNCRITTSVEE

SEQ ID NO: 3920 - protein, 42 aa, Artificial Sequence
  chemically synthesized
SQVSPFKIPIEELEDRVFVNCNTSIYRASSLSNCRLTTSVEE

SEQ ID NO: 3921 - protein, 42 aa, Artificial Sequence
  chemically synthesized
SQVSPFKIPIEELEDRVFVNCNTSIYRASSLSNCRMTTSVEE

SEQ ID NO: 3922 - protein, 42 aa, Artificial Sequence
  chemically synthesized
SQVSPFKIPIEELEDRVFVNCNTSIYRASSLSNCRVTTSVEE

SEQ ID NO: 3923 - protein, 42 aa, Artificial Sequence; identical to SEQ ID NO: 3803
  chemically synthesized

SEQ ID NO: 3924 - protein, 42 aa, Artificial Sequence
  chemically synthesized
SQVSPFKIPIEELEDRVFVNCNTSIYRASSLSNCRHYTSVEE

SEQ ID NO: 3925 - protein, 42 aa, Artificial Sequence
  chemically synthesized
SQVSPFKIPIEELEDRVFVNCNTSIYRASSLSNCRHTTTVEE

SEQ ID NO: 3926 - protein, 42 aa, Artificial Sequence
  chemically synthesized
SQVSPFKIPIEELEDRVFVNCNTSIYRASSLSNCRHTTYVEE

SEQ ID NO: 3927 - protein, 42 aa, Artificial Sequence
  chemically synthesized
SQVSPFKIPIEELEDRVFVNCNTSIYRASSLSNCRHTTSIEE

SEQ ID NO: 3928 - protein, 42 aa, Artificial Sequence
  chemically synthesized
SQVSPFKIPIEELEDRVFVNCNTSIYRASSLSNCRHTTSLEE

SEQ ID NO: 3929 - protein, 42 aa, Artificial Sequence
  chemically synthesized
SQVSPFKIPIEELEDRVFVNCNTSIYRASSLSNCRHTTSFEE

SEQ ID NO: 3930 - protein, 42 aa, Artificial Sequence
  chemically synthesized
SQVSPFKIPIEELEDRVFVNCNTSIYRASSLSNCRHTTSHEE

SEQ ID NO: 3931 - protein, 42 aa, Artificial Sequence
  chemically synthesized
SQVSPFKIPIEELEDRVFVNCNTSIYRASSLSNCRHTTSMEE

SEQ ID NO: 3932 - protein, 42 aa, Artificial Sequence
  chemically synthesized
SQVSPFKIPIEELEDRVFVNCNTSIYRASSLSNCRHTTSVDE

SEQ ID NO: 3933 - protein, 42 aa, Artificial Sequence
  chemically synthesized
  misc_feature (41)..(41): Xaa can be a proteinogenic, non-proteinogenic or synthetic amino acid like ornithin or selenocystein
SQVSPFKIPIEELEDRVFVNCNTSIYRASSLSNCRHTTSVXE

SEQ ID NO: 3934 - protein, 42 aa, Artificial Sequence
  chemically synthesized
SQVSPFKIPIEELEDRVFVNCNTSIYRASSLSNCRHTTSVED

SEQ ID NO: 3935 - protein, 42 aa, Artificial Sequence
  chemically synthesized
  misc_feature (42)..(42): Xaa can be a proteinogenic, non-proteinogenic or synthetic amino acid like ornithin or selenocystein
SQVSPFKIPIEELEDRVFVNCNTSIYRASSLSNCRHTTSVEX

SEQ ID NO: 3936 - protein, 42 aa, Artificial Sequence
  chemically synthesized
SQVSAFKIPIEELEDRVFVNCNTSIYRASSLSNCRHTTSVEE

SEQ ID NO: 3937 - protein, 42 aa, Artificial Sequence
  chemically synthesized
SQVSGFKIPIEELEDRVFVNCNTSIYRASSLSNCRHTTSVEE

SEQ ID NO: 3938 - protein, 42 aa, Artificial Sequence
  chemically synthesized
SQVSPFKIAIEELEDRVFVNCNTSIYRASSLSNCRHTTSVEE

SEQ ID NO: 3939 - protein, 42 aa, Artificial Sequence
  chemically synthesized
SQVSPFKIGIEELEDRVFVNCNTSIYRASSLSNCRHTTSVEE

SEQ ID NO: 3940 - protein, 42 aa, Artificial Sequence; identical to SEQ ID NO: 111
  chemically synthesized

SEQ ID NO: 3941 - protein, 42 aa, Artificial Sequence; identical to SEQ ID NO: 230
  chemically synthesized

SEQ ID NO: 3942 - protein, 42 aa, Artificial Sequence
  chemically synthesized
YQVSPFKIPIEELEDRVFVNCNTSIYRASSLSNCRHTSTVEE

SEQ ID NO: 3943 - protein, 42 aa, Artificial Sequence; identical to SEQ ID NO: 350
  chemically synthesized

SEQ ID NO: 3944 - protein, 42 aa, Artificial Sequence; identical to SEQ ID NO: 468
  chemically synthesized

SEQ ID NO: 3945 - protein, 42 aa, Artificial Sequence
  chemically synthesized
SQISPFKIPIEELEDRVFVNCNTSIYRASSLSNCRHTSTVEE

SEQ ID NO: 3946 - protein, 42 aa, Artificial Sequence
  chemically synthesized
SQPSPFKIPIEELEDRVFVNCNTSIYRASSLSNCRHTSTVEE

SEQ ID NO: 3947 - protein, 42 aa, Artificial Sequence
  chemically synthesized
SQFSPFKIPIEELEDRVFVNCNTSIYRASSLSNCRHTSTVEE

SEQ ID NO: 3948 - protein, 42 aa, Artificial Sequence; identical to SEQ ID NO: 587
  chemically synthesized

SEQ ID NO: 3949 - protein, 42 aa, Artificial Sequence
  chemically synthesized
SQVYPFKIPIEELEDRVFVNCNTSIYRASSLSNCRHTSTVEE

SEQ ID NO: 3950 - protein, 42 aa, Artificial Sequence
  chemically synthesized
SQVSPWKIPIEELEDRVFVNCNTSIYRASSLSNCRHTSTVEE

SEQ ID NO: 3951 - protein, 42 aa, Artificial Sequence
  chemically synthesized
SQVSPYKIPIEELEDRVFVNCNTSIYRASSLSNCRHTSTVEE

SEQ ID NO: 3952 - protein, 42 aa, Artificial Sequence
  chemically synthesized
SQVSPHKIPIEELEDRVFVNCNTSIYRASSLSNCRHTSTVEE

SEQ ID NO: 3953 - protein, 42 aa, Artificial Sequence
  chemically synthesized
SQVSPFRIPIEELEDRVFVNCNTSIYRASSLSNCRHTSTVEE

SEQ ID NO: 3954 - protein, 42 aa, Artificial Sequence
  chemically synthesized
SQVSPFHIPIEELEDRVFVNCNTSIYRASSLSNCRHTSTVEE

SEQ ID NO: 3955 - protein, 42 aa, Artificial Sequence
  chemically synthesized
  misc_feature (7)..(7): Xaa can be a proteinogenic, non-proteinogenic or synthetic amino acid like ornithin or selenocystein
SQVSPFXIPIEELEDRVFVNCNTSIYRASSLSNCRHTSTVEE

SEQ ID NO: 3956 - protein, 42 aa, Artificial Sequence; identical to SEQ ID NO: 826
  chemically synthesized

SEQ ID NO: 3957 - protein, 42 aa, Artificial Sequence
  chemically synthesized
SQVSPFKHPIEELEDRVFVNCNTSIYRASSLSNCRHTSTVEE

SEQ ID NO: 3958 - protein, 42 aa, Artificial Sequence
  chemically synthesized
SQVSPFKVPIEELEDRVFVNCNTSIYRASSLSNCRHTSTVEE

SEQ ID NO: 3959 - protein, 42 aa, Artificial Sequence
  chemically synthesized
SQVSPFKFPIEELEDRVFVNCNTSIYRASSLSNCRHTSTVEE

SEQ ID NO: 3960 - protein, 42 aa, Artificial Sequence
  chemically synthesized
SQVSPFKMPIEELEDRVFVNCNTSIYRASSLSNCRHTSTVEE

SEQ ID NO: 3961 - protein, 42 aa, Artificial Sequence; identical to SEQ ID NO: 944
  chemically synthesized

SEQ ID NO: 3962 - protein, 42 aa, Artificial Sequence
  chemically synthesized
SQVSPFKIPHEELEDRVFVNCNTSIYRASSLSNCRHTSTVEE

SEQ ID NO: 3963 - protein, 42 aa, Artificial Sequence
  chemically synthesized
SQVSPFKIPVEELEDRVFVNCNTSIYRASSLSNCRHTSTVEE

SEQ ID NO: 3964 - protein, 42 aa, Artificial Sequence
  chemically synthesized
SQVSPFKIPFEELEDRVFVNCNTSIYRASSLSNCRHTSTVEE

SEQ ID NO: 3965 - protein, 42 aa, Artificial Sequence
  chemically synthesized
SQVSPFKIPMEELEDRVFVNCNTSIYRASSLSNCRHTSTVEE

SEQ ID NO: 3966 - protein, 42 aa, Artificial Sequence; identical to SEQ ID NO: 1064
  chemically synthesized

SEQ ID NO: 3967 - protein, 42 aa, Artificial Sequence
  chemically synthesized
  misc_feature (11)..(11): Xaa can be a proteinogenic, non-proteinogenic or synthetic amino acid like ornithin or selenocystein
SQVSPFKIPIXELEDRVFVNCNTSIYRASSLSNCRHTSTVEE

SEQ ID NO: 3968 - protein, 42 aa, Artificial Sequence; identical to SEQ ID NO: 1184
  chemically synthesized

SEQ ID NO: 3969 - protein, 42 aa, Artificial Sequence
  chemically synthesized
  misc_feature (12)..(12): Xaa can be a proteinogenic, non-proteinogenic or synthetic amino acid like ornithin or selenocystein
SQVSPFKIPIEXLEDRVFVNCNTSIYRASSLSNCRHTSTVEE

SEQ ID NO: 3970 - protein, 42 aa, Artificial Sequence
  chemically synthesized
SQVSPFKIPIEEVEDRVFVNCNTSIYRASSLSNCRHTSTVEE

SEQ ID NO: 3971 - protein, 42 aa, Artificial Sequence; identical to SEQ ID NO: 1301
  chemically synthesized

SEQ ID NO: 3972 - protein, 42 aa, Artificial Sequence
  chemically synthesized
SQVSPFKIPIEEFEDRVFVNCNTSIYRASSLSNCRHTSTVEE

SEQ ID NO: 3973 - protein, 42 aa, Artificial Sequence
  chemically synthesized
SQVSPFKIPIEEHEDRVFVNCNTSIYRASSLSNCRHTSTVEE

SEQ ID NO: 3974 - protein, 42 aa, Artificial Sequence
  chemically synthesized
SQVSPFKIPIEEMEDRVFVNCNTSIYRASSLSNCRHTSTVEE

SEQ ID NO: 3975 - protein, 42 aa, Artificial Sequence; identical to SEQ ID NO: 1421
  chemically synthesized

SEQ ID NO: 3976 - protein, 42 aa, Artificial Sequence
  chemically synthesized
  misc_feature (14)..(14): Xaa can be a proteinogenic, non-proteinogenic or synthetic amino acid like ornithin or selenocystein
SQVSPFKIPIEELXDRVFVNCNTSIYRASSLSNCRHTSTVEE

SEQ ID NO: 3977 - protein, 42 aa, Artificial Sequence
  chemically synthesized
  misc_feature (15)..(15): Xaa can be a proteinogenic, non-proteinogenic or synthetic amino acid like ornithin or selenocystein
SQVSPFKIPIEELEXRVFVNCNTSIYRASSLSNCRHTSTVEE

SEQ ID NO: 3978 - protein, 42 aa, Artificial Sequence
  chemically synthesized
SQVSPFKIPIEELEERVFVNCNTSIYRASSLSNCRHTSTVEE

SEQ ID NO: 3979 - protein, 42 aa, Artificial Sequence; identical to SEQ ID NO: 1540
  chemically synthesized

SEQ ID NO: 3980 - protein, 42 aa, Artificial Sequence
  chemically synthesized
SQVSPFKIPIEELEDHVFVNCNTSIYRASSLSNCRHTSTVEE

SEQ ID NO: 3981 - protein, 42 aa, Artificial Sequence
  chemically synthesized
  misc_feature (16)..(16): Xaa can be a proteinogenic, non-proteinogenic or synthetic amino acid like ornithin or selenocystein
SQVSPFKIPIEELEDXVFVNCNTSIYRASSLSNCRHTSTVEE

SEQ ID NO: 3982 - protein, 42 aa, Artificial Sequence; identical to SEQ ID NO: 1657
  chemically synthesized

SEQ ID NO: 3983 - protein, 42 aa, Artificial Sequence
  chemically synthesized
SQVSPFKIPIEELEDRLFVNCNTSIYRASSLSNCRHTSTVEE

SEQ ID NO: 3984 - protein, 42 aa, Artificial Sequence
  chemically synthesized
SQVSPFKIPIEELEDRFFVNCNTSIYRASSLSNCRHTSTVEE

SEQ ID NO: 3985 - protein, 42 aa, Artificial Sequence
  chemically synthesized
SQVSPFKIPIEELEDRHFVNCNTSIYRASSLSNCRHTSTVEE

SEQ ID NO: 3986 - protein, 42 aa, Artificial Sequence
  chemically synthesized
SQVSPFKIPIEELEDRMFVNCNTSIYRASSLSNCRHTSTVEE

SEQ ID NO: 3987 - protein, 42 aa, Artificial Sequence; identical to SEQ ID NO: 1774
  chemically synthesized

SEQ ID NO: 3988 - protein, 42 aa, Artificial Sequence
  chemically synthesized
SQVSPFKIPIEELEDRVLVNCNTSIYRASSLSNCRHTSTVEE

SEQ ID NO: 3989 - protein, 42 aa, Artificial Sequence
  chemically synthesized
SQVSPFKIPIEELEDRVVVNCNTSIYRASSLSNCRHTSTVEE

SEQ ID NO: 3990 - protein, 42 aa, Artificial Sequence
  chemically synthesized
SQVSPFKIPIEELEDRVHVNCNTSIYRASSLSNCRHTSTVEE

SEQ ID NO: 3991 - protein, 42 aa, Artificial Sequence
  chemically synthesized
SQVSPFKIPIEELEDRVMVNCNTSIYRASSLSNCRHTSTVEE

SEQ ID NO: 3992 - protein, 42 aa, Artificial Sequence; identical to SEQ ID NO: 1891
  chemically synthesized

SEQ ID NO: 3993 - protein, 42 aa, Artificial Sequence
  chemically synthesized
SQVSPFKIPIEELEDRVFLNCNTSIYRASSLSNCRHTSTVEE

SEQ ID NO: 3994 - protein, 42 aa, Artificial Sequence
  chemically synthesized
SQVSPFKIPIEELEDRVFFNCNTSIYRASSLSNCRHTSTVEE

SEQ ID NO: 3995 - protein, 42 aa, Artificial Sequence
  chemically synthesized
SQVSPFKIPIEELEDRVFHNCNTSIYRASSLSNCRHTSTVEE

SEQ ID NO: 3996 - protein, 42 aa, Artificial Sequence
  chemically synthesized
SQVSPFKIPIEELEDRVFMNCNTSIYRASSLSNCRHTSTVEE

SEQ ID NO: 3997 - protein, 42 aa, Artificial Sequence; identical to SEQ ID NO: 2012
  chemically synthesized

SEQ ID NO: 3998 - protein, 42 aa, Artificial Sequence
  chemically synthesized
SQVSPFKIPIEELEDRVFVNSNTSIYRASSLSNCRHTSTVEE

SEQ ID NO: 3999 - protein, 42 aa, Artificial Sequence
  chemically synthesized
SQVSPFKIPIEELEDRVFVNGNTSIYRASSLSNCRHTSTVEE

SEQ ID NO: 4000 - protein, 42 aa, Artificial Sequence
  chemically synthesized
SQVSPFKIPIEELEDRVFVNANTSIYRASSLSNCRHTSTVEE

SEQ ID NO: 4001 - protein, 42 aa, Artificial Sequence; identical to SEQ ID NO: 2253
  chemically synthesized

SEQ ID NO: 4002 - protein, 42 aa, Artificial Sequence; identical to SEQ ID NO: 2373
  chemically synthesized

SEQ ID NO: 4003 - protein, 42 aa, Artificial Sequence
  chemically synthesized
SQVSPFKIPIEELEDRVFVNCNYSIYRASSLSNCRHTSTVEE

SEQ ID NO: 4004 - protein, 42 aa, Artificial Sequence; identical to SEQ ID NO: 2493
  chemically synthesized

SEQ ID NO: 4005 - protein, 42 aa, Artificial Sequence
  chemically synthesized
SQVSPFKIPIEELEDRVFVNCNTYIYRASSLSNCRHTSTVEE

SEQ ID NO: 4006 - protein, 42 aa, Artificial Sequence
  chemically synthesized
SQVSPFKIPIEELEDRVFVNCNTSVYRASSLSNCRHTSTVEE

SEQ ID NO: 4007 - protein, 42 aa, Artificial Sequence; identical to SEQ ID NO: 2610
  chemically synthesized

SEQ ID NO: 4008 - protein, 42 aa, Artificial Sequence
  chemically synthesized
SQVSPFKIPIEELEDRVFVNCNTSHYRASSLSNCRHTSTVEE

SEQ ID NO: 4009 - protein, 42 aa, Artificial Sequence
  chemically synthesized
SQVSPFKIPIEELEDRVFVNCNTSFYRASSLSNCRHTSTVEE

SEQ ID NO: 4010 - protein, 42 aa, Artificial Sequence
  chemically synthesized
SQVSPFKIPIEELEDRVFVNCNTSMYRASSLSNCRHTSTVEE

SEQ ID NO: 4011 - protein, 42 aa, Artificial Sequence
  chemically synthesized
SQVSPFKIPIEELEDRVFVNCNTSIWRASSLSNCRHTSTVEE

SEQ ID NO: 4012 - protein, 42 aa, Artificial Sequence
  chemically synthesized
SQVSPFKIPIEELEDRVFVNCNTSIFRASSLSNCRHTSTVEE

SEQ ID NO: 4013 - protein, 42 aa, Artificial Sequence
  chemically synthesized
SQVSPFKIPIEELEDRVFVNCNTSISRASSLSNCRHTSTVEE

SEQ ID NO: 4014 - protein, 42 aa, Artificial Sequence; identical to SEQ ID NO: 2728
  chemically synthesized

SEQ ID NO: 4015 - protein, 42 aa, Artificial Sequence
  chemically synthesized
  misc_feature (27)..(27): Xaa can be a proteinogenic, non-proteinogenic or synthetic amino acid like ornithin or selenocystein
SQVSPFKIPIEELEDRVFVNCNTSIYXASSLSNCRHTSTVEE

SEQ ID NO: 4016 - protein, 42 aa, Artificial Sequence
  chemically synthesized
SQVSPFKIPIEELEDRVFVNCNTSIYHASSLSNCRHTSTVEE

SEQ ID NO: 4017 - protein, 42 aa, Artificial Sequence; identical to SEQ ID NO: 2847
  chemically synthesized

SEQ ID NO: 4018 - protein, 42 aa, Artificial Sequence; identical to SEQ ID NO: 2968
  chemically synthesized

SEQ ID NO: 4019 - protein, 42 aa, Artificial Sequence; identical to SEQ ID NO: 3088
  chemically synthesized

SEQ ID NO: 4020 - protein, 42 aa, Artificial Sequence
  chemically synthesized
SQVSPFKIPIEELEDRVFVNCNTSIYRAYSLSNCRHTSTVEE

SEQ ID NO: 4021 - protein, 42 aa, Artificial Sequence; identical to SEQ ID NO: 3208
  chemically synthesized

SEQ ID NO: 4022 - protein, 42 aa, Artificial Sequence
  chemically synthesized
SQVSPFKIPIEELEDRVFVNCNTSIYRASYLSNCRHTSTVEE

SEQ ID NO: 4023 - protein, 42 aa, Artificial Sequence; identical to SEQ ID NO: 3325
  chemically synthesized

SEQ ID NO: 4024 - protein, 42 aa, Artificial Sequence
  chemically synthesized
SQVSPFKIPIEELEDRVFVNCNTSIYRASSVSNCRHTSTVEE

SEQ ID NO: 4025 - protein, 42 aa, Artificial Sequence
  chemically synthesized
SQVSPFKIPIEELEDRVFVNCNTSIYRASSFSNCRHTSTVEE

SEQ ID NO: 4026 - protein, 42 aa, Artificial Sequence
  chemically synthesized
SQVSPFKIPIEELEDRVFVNCNTSIYRASSMSNCRHTSTVEE

SEQ ID NO: 4027 - protein, 42 aa, Artificial Sequence
  chemically synthesized
SQVSPFKIPIEELEDRVFVNCNTSIYRASSHSNCRHTSTVEE

SEQ ID NO: 4028 - protein, 42 aa, Artificial Sequence; identical to SEQ ID NO: 3445
  chemically synthesized

SEQ ID NO: 4029 - protein, 42 aa, Artificial Sequence
  chemically synthesized
SQVSPFKIPIEELEDRVFVNCNTSIYRASSLYNCRHTSTVEE

SEQ ID NO: 4030 - protein, 42 aa, Artificial Sequence; identical to SEQ ID NO: 3566
  chemically synthesized

SEQ ID NO: 4031 - protein, 42 aa, Artificial Sequence
  chemically synthesized
SQVSPFKIPIEELEDRVFVNCNTSIYRASSLSNSRHTSTVEE

SEQ ID NO: 4032 - protein, 42 aa, Artificial Sequence
  chemically synthesized
SQVSPFKIPIEELEDRVFVNCNTSIYRASSLSNGRHTSTVEE

SEQ ID NO: 4033 - protein, 42 aa, Artificial Sequence
  chemically synthesized
SQVSPFKIPIEELEDRVFVNCNTSIYRASSLSNARHTSTVEE

SEQ ID NO: 4034 - protein, 42 aa, Artificial Sequence
  chemically synthesized
  misc_feature (35)..(35): Xaa can be a proteinogenic, non-proteinogenic or synthetic amino acid like ornithin or selenocystein
SQVSPFKIPIEELEDRVFVNCNTSIYRASSLSNCXHTSTVEE

SEQ ID NO: 4035 - protein, 42 aa, Artificial Sequence
  chemically synthesized
SQVSPFKIPIEELEDRVFVNCNTSIYRASSLSNCHHTSTVEE

SEQ ID NO: 4036 - protein, 42 aa, Artificial Sequence; identical to SEQ ID NO: 3685
  chemically synthesized

SEQ ID NO: 4037 - protein, 42 aa, Artificial Sequence
  chemically synthesized
SQVSPFKIPIEELEDRVFVNCNTSIYRASSLSNCRGTSTVEE

SEQ ID NO: 4038 - protein, 42 aa, Artificial Sequence
  chemically synthesized
SQVSPFKIPIEELEDRVFVNCNTSIYRASSLSNCRATSTVEE

SEQ ID NO: 4039 - protein, 42 aa, Artificial Sequence
  chemically synthesized
SQVSPFKIPIEELEDRVFVNCNTSIYRASSLSNCRITSTVEE

SEQ ID NO: 4040 - protein, 42 aa, Artificial Sequence
  chemically synthesized
SQVSPFKIPIEELEDRVFVNCNTSIYRASSLSNCRLTSTVEE

SEQ ID NO: 4041 - protein, 42 aa, Artificial Sequence
  chemically synthesized
SQVSPFKIPIEELEDRVFVNCNTSIYRASSLSNCRMTSTVEE

SEQ ID NO: 4042 - protein, 42 aa, Artificial Sequence
  chemically synthesized
SQVSPFKIPIEELEDRVFVNCNTSIYRASSLSNCRVTSTVEE

SEQ ID NO: 4043 - protein, 42 aa, Artificial Sequence; identical to SEQ ID NO: 3805
  chemically synthesized

SEQ ID NO: 4044 - protein, 42 aa, Artificial Sequence
  chemically synthesized
SQVSPFKIPIEELEDRVFVNCNTSIYRASSLSNCRHYSTVEE

SEQ ID NO: 4045 - protein, 42 aa, Artificial Sequence; identical to SEQ ID NO: 3925
  chemically synthesized

SEQ ID NO: 4046 - protein, 42 aa, Artificial Sequence
  chemically synthesized
SQVSPFKIPIEELEDRVFVNCNTSIYRASSLSNCRHTYTVEE

SEQ ID NO: 4047 - protein, 42 aa, Artificial Sequence
  chemically synthesized
SQVSPFKIPIEELEDRVFVNCNTSIYRASSLSNCRHTSTIEE

SEQ ID NO: 4048 - protein, 42 aa, Artificial Sequence
  chemically synthesized
SQVSPFKIPIEELEDRVFVNCNTSIYRASSLSNCRHTSTLEE

SEQ ID NO: 4049 - protein, 42 aa, Artificial Sequence
  chemically synthesized
SQVSPFKIPIEELEDRVFVNCNTSIYRASSLSNCRHTSTFEE

SEQ ID NO: 4050 - protein, 42 aa, Artificial Sequence
  chemically synthesized
SQVSPFKIPIEELEDRVFVNCNTSIYRASSLSNCRHTSTHEE

SEQ ID NO: 4051 - protein, 42 aa, Artificial Sequence
  chemically synthesized
SQVSPFKIPIEELEDRVFVNCNTSIYRASSLSNCRHTSTMEE

SEQ ID NO: 4052 - protein, 42 aa, Artificial Sequence
  chemically synthesized
SQVSPFKIPIEELEDRVFVNCNTSIYRASSLSNCRHTSTVDE

SEQ ID NO: 4053 - protein, 42 aa, Artificial Sequence
  chemically synthesized
  misc_feature (41)..(41): Xaa can be a proteinogenic, non-proteinogenic or synthetic amino acid like ornithin or selenocystein
SQVSPFKIPIEELEDRVFVNCNTSIYRASSLSNCRHTSTVXE

SEQ ID NO: 4054 - protein, 42 aa, Artificial Sequence
  chemically synthesized
SQVSPFKIPIEELEDRVFVNCNTSIYRASSLSNCRHTSTVED

SEQ ID NO: 4055 - protein, 42 aa, Artificial Sequence
  chemically synthesized
  misc_feature (42)..(42): Xaa can be a proteinogenic, non-proteinogenic or synthetic amino acid like ornithin or selenocystein
SQVSPFKIPIEELEDRVFVNCNTSIYRASSLSNCRHTSTVEX

SEQ ID NO: 4056 - protein, 42 aa, Artificial Sequence
  chemically synthesized
SQVSAFKIPIEELEDRVFVNCNTSIYRASSLSNCRHTSTVEE

SEQ ID NO: 4057 - protein, 42 aa, Artificial Sequence
  chemically synthesized
SQVSGFKIPIEELEDRVFVNCNTSIYRASSLSNCRHTSTVEE

SEQ ID NO: 4058 - protein, 42 aa, Artificial Sequence
  chemically synthesized
SQVSPFKIAIEELEDRVFVNCNTSIYRASSLSNCRHTSTVEE

SEQ ID NO: 4059 - protein, 42 aa, Artificial Sequence
  chemically synthesized
SQVSPFKIGIEELEDRVFVNCNTSIYRASSLSNCRHTSTVEE

SEQ ID NO: 4060 - protein, 42 aa, Artificial Sequence; identical to SEQ ID NO: 113
  chemically synthesized

SEQ ID NO: 4061 - protein, 42 aa, Artificial Sequence; identical to SEQ ID NO: 232
  chemically synthesized

SEQ ID NO: 4062 - protein, 42 aa, Artificial Sequence
  chemically synthesized
YQVSPFKIPIEELEDRVFVNCNTSIYRASSLSNCRHTSSIEE

SEQ ID NO: 4063 - protein, 42 aa, Artificial Sequence; identical to SEQ ID NO: 352
  chemically synthesized

SEQ ID NO: 4064 - protein, 42 aa, Artificial Sequence; identical to SEQ ID NO: 470
  chemically synthesized

SEQ ID NO: 4065 - protein, 42 aa, Artificial Sequence
  chemically synthesized
SQISPFKIPIEELEDRVFVNCNTSIYRASSLSNCRHTSSIEE

SEQ ID NO: 4066 - protein, 42 aa, Artificial Sequence
  chemically synthesized
SQPSPFKIPIEELEDRVFVNCNTSIYRASSLSNCRHTSSIEE

SEQ ID NO: 4067 - protein, 42 aa, Artificial Sequence
  chemically synthesized
SQFSPFKIPIEELEDRVFVNCNTSIYRASSLSNCRHTSSIEE

SEQ ID NO: 4068 - protein, 42 aa, Artificial Sequence; identical to SEQ ID NO: 589
  chemically synthesized

SEQ ID NO: 4069 - protein, 42 aa, Artificial Sequence
  chemically synthesized
SQVYPFKIPIEELEDRVFVNCNTSIYRASSLSNCRHTSSIEE

SEQ ID NO: 4070 - protein, 42 aa, Artificial Sequence
  chemically synthesized
SQVSPWKIPIEELEDRVFVNCNTSIYRASSLSNCRHTSSIEE

SEQ ID NO: 4071 - protein, 42 aa, Artificial Sequence
  chemically synthesized
SQVSPYKIPIEELEDRVFVNCNTSIYRASSLSNCRHTSSIEE

SEQ ID NO: 4072 - protein, 42 aa, Artificial Sequence
  chemically synthesized
SQVSPHKIPIEELEDRVFVNCNTSIYRASSLSNCRHTSSIEE

SEQ ID NO: 4073 - protein, 42 aa, Artificial Sequence
  chemically synthesized
SQVSPFRIPIEELEDRVFVNCNTSIYRASSLSNCRHTSSIEE

SEQ ID NO: 4074 - protein, 42 aa, Artificial Sequence
  chemically synthesized
SQVSPFHIPIEELEDRVFVNCNTSIYRASSLSNCRHTSSIEE

SEQ ID NO: 4075 - protein, 42 aa, Artificial Sequence
  chemically synthesized
  misc_feature (7)..(7): Xaa can be a proteinogenic, non-proteinogenic or synthetic amino acid like ornithin or selenocystein
SQVSPFXIPIEELEDRVFVNCNTSIYRASSLSNCRHTSSIEE

SEQ ID NO: 4076 - protein, 42 aa, Artificial Sequence; identical to SEQ ID NO: 828
  chemically synthesized

SEQ ID NO: 4077 - protein, 42 aa, Artificial Sequence
  chemically synthesized
SQVSPFKHPIEELEDRVFVNCNTSIYRASSLSNCRHTSSIEE

SEQ ID NO: 4078 - protein, 42 aa, Artificial Sequence
  chemically synthesized
SQVSPFKVPIEELEDRVFVNCNTSIYRASSLSNCRHTSSIEE

SEQ ID NO: 4079 - protein, 42 aa, Artificial Sequence
  chemically synthesized
SQVSPFKFPIEELEDRVFVNCNTSIYRASSLSNCRHTSSIEE

SEQ ID NO: 4080 - protein, 42 aa, Artificial Sequence
  chemically synthesized
SQVSPFKMPIEELEDRVFVNCNTSIYRASSLSNCRHTSSIEE

SEQ ID NO: 4081 - protein, 42 aa, Artificial Sequence; identical to SEQ ID NO: 946
  chemically synthesized

SEQ ID NO: 4082 - protein, 42 aa, Artificial Sequence
  chemically synthesized
SQVSPFKIPHEELEDRVFVNCNTSIYRASSLSNCRHTSSIEE

SEQ ID NO: 4083 - protein, 42 aa, Artificial Sequence
  chemically synthesized
SQVSPFKIPVEELEDRVFVNCNTSIYRASSLSNCRHTSSIEE

SEQ ID NO: 4084 - protein, 42 aa, Artificial Sequence
  chemically synthesized
SQVSPFKIPFEELEDRVFVNCNTSIYRASSLSNCRHTSSIEE

SEQ ID NO: 4085 - protein, 42 aa, Artificial Sequence
  chemically synthesized
SQVSPFKIPMEELEDRVFVNCNTSIYRASSLSNCRHTSSIEE

SEQ ID NO: 4086 - protein, 42 aa, Artificial Sequence
  chemically synthesized
SQVSPFKIPIDELEDRVFVNCNTSIYRASSLSNCRHTSSIEE

SEQ ID NO: 4087 - protein, 42 aa, Artificial Sequence
  chemically synthesized
  misc_feature (11)..(11): Xaa can be a proteinogenic, non-proteinogenic or synthetic amino acid like ornithin or selenocystein
SQVSPFKIPIXELEDRVFVNCNTSIYRASSLSNCRHTSSIEE

SEQ ID NO: 4088 - protein, 42 aa, Artificial Sequence; identical to SEQ ID NO: 1186
  chemically synthesized

SEQ ID NO: 4089 - protein, 42 aa, Artificial Sequence
  chemically synthesized
  misc_feature (12)..(12): Xaa can be a proteinogenic, non-proteinogenic or synthetic amino acid like ornithin or selenocystein
SQVSPFKIPIEXLEDRVFVNCNTSIYRASSLSNCRHTSSIEE

SEQ ID NO: 4090 - protein, 42 aa, Artificial Sequence
  chemically synthesized
SQVSPFKIPIEEVEDRVFVNCNTSIYRASSLSNCRHTSSIEE

SEQ ID NO: 4091 - protein, 42 aa, Artificial Sequence; identical to SEQ ID NO: 1303
  chemically synthesized

SEQ ID NO: 4092 - protein, 42 aa, Artificial Sequence
  chemically synthesized
SQVSPFKIPIEEFEDRVFVNCNTSIYRASSLSNCRHTSSIEE

SEQ ID NO: 4093 - protein, 42 aa, Artificial Sequence
  chemically synthesized
SQVSPFKIPIEEHEDRVFVNCNTSIYRASSLSNCRHTSSIEE

SEQ ID NO: 4094 - protein, 42 aa, Artificial Sequence
  chemically synthesized
SQVSPFKIPIEEMEDRVFVNCNTSIYRASSLSNCRHTSSIEE

SEQ ID NO: 4095 - protein, 42 aa, Artificial Sequence; identical to SEQ ID NO: 1423
  chemically synthesized

SEQ ID NO: 4096 - protein, 42 aa, Artificial Sequence
  chemically synthesized
  misc_feature (14)..(14): Xaa can be a proteinogenic, non-proteinogenic or synthetic amino acid like ornithin or selenocystein
SQVSPFKIPIEELXDRVFVNCNTSIYRASSLSNCRHTSSIEE

SEQ ID NO: 4097 - protein, 42 aa, Artificial Sequence
  chemically synthesized
  misc_feature (15)..(15): Xaa can be a proteinogenic, non-proteinogenic or synthetic amino acid like ornithin or selenocystein
SQVSPFKIPIEELEXRVFVNCNTSIYRASSLSNCRHTSSIEE

SEQ ID NO: 4098 - protein, 42 aa, Artificial Sequence
  chemically synthesized
SQVSPFKIPIEELEERVFVNCNTSIYRASSLSNCRHTSSIEE

SEQ ID NO: 4099 - protein, 42 aa, Artificial Sequence; identical to SEQ ID NO: 1542
  chemically synthesized

SEQ ID NO: 4100 - protein, 42 aa, Artificial Sequence
  chemically synthesized
SQVSPFKIPIEELEDHVFVNCNTSIYRASSLSNCRHTSSIEE

SEQ ID NO: 4101 - protein, 42 aa, Artificial Sequence
  chemically synthesized
  misc_feature (16)..(16): Xaa can be a proteinogenic, non-proteinogenic or synthetic amino acid like ornithin or selenocystein
SQVSPFKIPIEELEDXVFVNCNTSIYRASSLSNCRHTSSIEE

SEQ ID NO: 4102 - protein, 42 aa, Artificial Sequence; identical to SEQ ID NO: 1659
  chemically synthesized

SEQ ID NO: 4103 - protein, 42 aa, Artificial Sequence
  chemically synthesized
SQVSPFKIPIEELEDRLFVNCNTSIYRASSLSNCRHTSSIEE

SEQ ID NO: 4104 - protein, 42 aa, Artificial Sequence
  chemically synthesized
SQVSPFKIPIEELEDRFFVNCNTSIYRASSLSNCRHTSSIEE

SEQ ID NO: 4105 - protein, 42 aa, Artificial Sequence
  chemically synthesized
SQVSPFKIPIEELEDRHFVNCNTSIYRASSLSNCRHTSSIEE

SEQ ID NO: 4106 - protein, 42 aa, Artificial Sequence
  chemically synthesized
SQVSPFKIPIEELEDRMFVNCNTSIYRASSLSNCRHTSSIEE

SEQ ID NO: 4107 - protein, 42 aa, Artificial Sequence; identical to SEQ ID NO: 1776
  chemically synthesized

SEQ ID NO: 4108 - protein, 42 aa, Artificial Sequence
  chemically synthesized
SQVSPFKIPIEELEDRVLVNCNTSIYRASSLSNCRHTSSIEE

SEQ ID NO: 4109 - protein, 42 aa, Artificial Sequence
  chemically synthesized
SQVSPFKIPIEELEDRVVVNCNTSIYRASSLSNCRHTSSIEE

SEQ ID NO: 4110 - protein, 42 aa, Artificial Sequence
  chemically synthesized
SQVSPFKIPIEELEDRVHVNCNTSIYRASSLSNCRHTSSIEE

SEQ ID NO: 4111 - protein, 42 aa, Artificial Sequence
  chemically synthesized
SQVSPFKIPIEELEDRVMVNCNTSIYRASSLSNCRHTSSIEE

SEQ ID NO: 4112 - protein, 42 aa, Artificial Sequence; identical to SEQ ID NO: 1893
  chemically synthesized

SEQ ID NO: 4113 - protein, 42 aa, Artificial Sequence
  chemically synthesized
SQVSPFKIPIEELEDRVFLNCNTSIYRASSLSNCRHTSSIEE

SEQ ID NO: 4114 - protein, 42 aa, Artificial Sequence
  chemically synthesized
SQVSPFKIPIEELEDRVFFNCNTSIYRASSLSNCRHTSSIEE

SEQ ID NO: 4115 - protein, 42 aa, Artificial Sequence
  chemically synthesized
SQVSPFKIPIEELEDRVFHNCNTSIYRASSLSNCRHTSSIEE

SEQ ID NO: 4116 - protein, 42 aa, Artificial Sequence
  chemically synthesized
SQVSPFKIPIEELEDRVFMNCNTSIYRASSLSNCRHTSSIEE

SEQ ID NO: 4117 - protein, 42 aa, Artificial Sequence; identical to SEQ ID NO: 2014
  chemically synthesized

SEQ ID NO: 4118 - protein, 42 aa, Artificial Sequence
  chemically synthesized
SQVSPFKIPIEELEDRVFVNSNTSIYRASSLSNCRHTSSIEE

SEQ ID NO: 4119 - protein, 42 aa, Artificial Sequence
  chemically synthesized
SQVSPFKIPIEELEDRVFVNGNTSIYRASSLSNCRHTSSIEE

SEQ ID NO: 4120 - protein, 42 aa, Artificial Sequence
  chemically synthesized
SQVSPFKIPIEELEDRVFVNANTSIYRASSLSNCRHTSSIEE

SEQ ID NO: 4121 - protein, 42 aa, Artificial Sequence; identical to SEQ ID NO: 2255
  chemically synthesized

SEQ ID NO: 4122 - protein, 42 aa, Artificial Sequence; identical to SEQ ID NO: 2375
  chemically synthesized

SEQ ID NO: 4123 - protein, 42 aa, Artificial Sequence
  chemically synthesized
SQVSPFKIPIEELEDRVFVNCNYSIYRASSLSNCRHTSSIEE

SEQ ID NO: 4124 - protein, 42 aa, Artificial Sequence; identical to SEQ ID NO: 2495
  chemically synthesized

SEQ ID NO: 4125 - protein, 42 aa, Artificial Sequence
  chemically synthesized
SQVSPFKIPIEELEDRVFVNCNTYIYRASSLSNCRHTSSIEE

SEQ ID NO: 4126 - protein, 42 aa, Artificial Sequence
  chemically synthesized
SQVSPFKIPIEELEDRVFVNCNTSVYRASSLSNCRHTSSIEE

SEQ ID NO: 4127 - protein, 42 aa, Artificial Sequence; identical to SEQ ID NO: 2612
  chemically synthesized

SEQ ID NO: 4128 - protein, 42 aa, Artificial Sequence
  chemically synthesized
SQVSPFKIPIEELEDRVFVNCNTSHYRASSLSNCRHTSSIEE

SEQ ID NO: 4129 - protein, 42 aa, Artificial Sequence
  chemically synthesized
SQVSPFKIPIEELEDRVFVNCNTSFYRASSLSNCRHTSSIEE

SEQ ID NO: 4130 - protein, 42 aa, Artificial Sequence
  chemically synthesized
SQVSPFKIPIEELEDRVFVNCNTSMYRASSLSNCRHTSSIEE

SEQ ID NO: 4131 - protein, 42 aa, Artificial Sequence
  chemically synthesized
SQVSPFKIPIEELEDRVFVNCNTSIWRASSLSNCRHTSSIEE

SEQ ID NO: 4132 - protein, 42 aa, Artificial Sequence
  chemically synthesized
SQVSPFKIPIEELEDRVFVNCNTSIFRASSLSNCRHTSSIEE

SEQ ID NO: 4133 - protein, 42 aa, Artificial Sequence
  chemically synthesized
SQVSPFKIPIEELEDRVFVNCNTSISRASSLSNCRHTSSIEE

SEQ ID NO: 4134 - protein, 42 aa, Artificial Sequence; identical to SEQ ID NO: 2730
  chemically synthesized

SEQ ID NO: 4135 - protein, 42 aa, Artificial Sequence
  chemically synthesized
  misc_feature (27)..(27): Xaa can be a proteinogenic, non-proteinogenic or synthetic amino acid like ornithin or selenocystein
SQVSPFKIPIEELEDRVFVNCNTSIYXASSLSNCRHTSSIEE

SEQ ID NO: 4136 - protein, 42 aa, Artificial Sequence
  chemically synthesized
SQVSPFKIPIEELEDRVFVNCNTSIYHASSLSNCRHTSSIEE

SEQ ID NO: 4137 - protein, 42 aa, Artificial Sequence; identical to SEQ ID NO: 2849
  chemically synthesized

SEQ ID NO: 4138 - protein, 42 aa, Artificial Sequence; identical to SEQ ID NO: 2970
  chemically synthesized

SEQ ID NO: 4139 - protein, 42 aa, Artificial Sequence; identical to SEQ ID NO: 3090
  chemically synthesized

SEQ ID NO: 4140 - protein, 42 aa, Artificial Sequence
  chemically synthesized
SQVSPFKIPIEELEDRVFVNCNTSIYRAYSLSNCRHTSSIEE

SEQ ID NO: 4141 - protein, 42 aa, Artificial Sequence; identical to SEQ ID NO: 3210
  chemically synthesized

SEQ ID NO: 4142 - protein, 42 aa, Artificial Sequence
  chemically synthesized
SQVSPFKIPIEELEDRVFVNCNTSIYRASYLSNCRHTSSIEE

SEQ ID NO: 4143 - protein, 42 aa, Artificial Sequence; identical to SEQ ID NO: 3327
  chemically synthesized

SEQ ID NO: 4144 - protein, 42 aa, Artificial Sequence
  chemically synthesized
SQVSPFKIPIEELEDRVFVNCNTSIYRASSVSNCRHTSSIEE

SEQ ID NO: 4145 - protein, 42 aa, Artificial Sequence
  chemically synthesized
SQVSPFKIPIEELEDRVFVNCNTSIYRASSFSNCRHTSSIEE

SEQ ID NO: 4146 - protein, 42 aa, Artificial Sequence
  chemically synthesized
SQVSPFKIPIEELEDRVFVNCNTSIYRASSMSNCRHTSSIEE

SEQ ID NO: 4147 - protein, 42 aa, Artificial Sequence
  chemically synthesized
SQVSPFKIPIEELEDRVFVNCNTSIYRASSHSNCRHTSSIEE

SEQ ID NO: 4148 - protein, 42 aa, Artificial Sequence; identical to SEQ ID NO: 3447
  chemically synthesized

SEQ ID NO: 4149 - protein, 42 aa, Artificial Sequence
  chemically synthesized
SQVSPFKIPIEELEDRVFVNCNTSIYRASSLYNCRHTSSIEE

SEQ ID NO: 4150 - protein, 42 aa, Artificial Sequence; identical to SEQ ID NO: 3568
  chemically synthesized

SEQ ID NO: 4151 - protein, 42 aa, Artificial Sequence
  chemically synthesized
SQVSPFKIPIEELEDRVFVNCNTSIYRASSLSNSRHTSSIEE

SEQ ID NO: 4152 - protein, 42 aa, Artificial Sequence
  chemically synthesized
SQVSPFKIPIEELEDRVFVNCNTSIYRASSLSNGRHTSSIEE

SEQ ID NO: 4153 - protein, 42 aa, Artificial Sequence
  chemically synthesized
SQVSPFKIPIEELEDRVFVNCNTSIYRASSLSNARHTSSIEE

SEQ ID NO: 4154 - protein, 42 aa, Artificial Sequence
  chemically synthesized
  misc_feature (35)..(35): Xaa can be a proteinogenic, non-proteinogenic or synthetic amino acid like ornithin or selenocystein
SQVSPFKIPIEELEDRVFVNCNTSIYRASSLSNCXHTSSIEE

SEQ ID NO: 4155 - protein, 42 aa, Artificial Sequence
  chemically synthesized
SQVSPFKIPIEELEDRVFVNCNTSIYRASSLSNCHHTSSIEE

SEQ ID NO: 4156 - protein, 42 aa, Artificial Sequence; identical to SEQ ID NO: 3687
  chemically synthesized

SEQ ID NO: 4157 - protein, 42 aa, Artificial Sequence
  chemically synthesized
SQVSPFKIPIEELEDRVFVNCNTSIYRASSLSNCRGTSSIEE

SEQ ID NO: 4158 - protein, 42 aa, Artificial Sequence
  chemically synthesized
SQVSPFKIPIEELEDRVFVNCNTSIYRASSLSNCRATSSIEE

SEQ ID NO: 4159 - protein, 42 aa, Artificial Sequence
  chemically synthesized
SQVSPFKIPIEELEDRVFVNCNTSIYRASSLSNCRITSSIEE

SEQ ID NO: 4160 - protein, 42 aa, Artificial Sequence
  chemically synthesized
SQVSPFKIPIEELEDRVFVNCNTSIYRASSLSNCRLTSSIEE

SEQ ID NO: 4161 - protein, 42 aa, Artificial Sequence
  chemically synthesized
SQVSPFKIPIEELEDRVFVNCNTSIYRASSLSNCRMTSSIEE

SEQ ID NO: 4162 - protein, 42 aa, Artificial Sequence
  chemically synthesized
SQVSPFKIPIEELEDRVFVNCNTSIYRASSLSNCRVTSSIEE

SEQ ID NO: 4163 - protein, 42 aa, Artificial Sequence; identical to SEQ ID NO: 3807
  chemically synthesized

SEQ ID NO: 4164 - protein, 42 aa, Artificial Sequence
  chemically synthesized
SQVSPFKIPIEELEDRVFVNCNTSIYRASSLSNCRHYSSIEE

SEQ ID NO: 4165 - protein, 42 aa, Artificial Sequence; identical to SEQ ID NO: 3927
  chemically synthesized

SEQ ID NO: 4166 - protein, 42 aa, Artificial Sequence
  chemically synthesized
SQVSPFKIPIEELEDRVFVNCNTSIYRASSLSNCRHTYSIEE

SEQ ID NO: 4167 - protein, 42 aa, Artificial Sequence; identical to SEQ ID NO: 4047
  chemically synthesized

SEQ ID NO: 4168 - protein, 42 aa, Artificial Sequence
  chemically synthesized
SQVSPFKIPIEELEDRVFVNCNTSIYRASSLSNCRHTSYIEE

SEQ ID NO: 4169 - protein, 42 aa, Artificial Sequence
  chemically synthesized
SQVSPFKIPIEELEDRVFVNCNTSIYRASSLSNCRHTSSIDE

SEQ ID NO: 4170 - protein, 42 aa, Artificial Sequence
  chemically synthesized
  misc_feature (41)..(41): Xaa can be a proteinogenic, non-proteinogenic or synthetic amino acid like ornithin or selenocystein
SQVSPFKIPIEELEDRVFVNCNTSIYRASSLSNCRHTSSIXE

SEQ ID NO: 4171 - protein, 42 aa, Artificial Sequence
  chemically synthesized
SQVSPFKIPIEELEDRVFVNCNTSIYRASSLSNCRHTSSIED

SEQ ID NO: 4172 - protein, 42 aa, Artificial Sequence
  chemically synthesized
  misc_feature (42)..(42): Xaa can be a proteinogenic, non-proteinogenic or synthetic amino acid like ornithin or selenocystein
SQVSPFKIPIEELEDRVFVNCNTSIYRASSLSNCRHTSSIEX

SEQ ID NO: 4173 - protein, 42 aa, Artificial Sequence
  chemically synthesized
SQVSAFKIPIEELEDRVFVNCNTSIYRASSLSNCRHTSSIEE

SEQ ID NO: 4174 - protein, 42 aa, Artificial Sequence
  chemically synthesized
SQVSGFKIPIEELEDRVFVNCNTSIYRASSLSNCRHTSSIEE

SEQ ID NO: 4175 - protein, 42 aa, Artificial Sequence
  chemically synthesized
SQVSPFKIAIEELEDRVFVNCNTSIYRASSLSNCRHTSSIEE

SEQ ID NO: 4176 - protein, 42 aa, Artificial Sequence
  chemically synthesized
SQVSPFKIGIEELEDRVFVNCNTSIYRASSLSNCRHTSSIEE

SEQ ID NO: 4177 - protein, 42 aa, Artificial Sequence; identical to SEQ ID NO: 118
  chemically synthesized

SEQ ID NO: 4178 - protein, 42 aa, Artificial Sequence; identical to SEQ ID NO: 237
  chemically synthesized

SEQ ID NO: 4179 - protein, 42 aa, Artificial Sequence
  chemically synthesized
YQVSPFKIPIEELEDRVFVNCNTSIYRASSLSNCRHTSSVDE

SEQ ID NO: 4180 - protein, 42 aa, Artificial Sequence; identical to SEQ ID NO: 357
  chemically synthesized

SEQ ID NO: 4181 - protein, 42 aa, Artificial Sequence; identical to SEQ ID NO: 475
  chemically synthesized

SEQ ID NO: 4182 - protein, 42 aa, Artificial Sequence
  chemically synthesized
SQISPFKIPIEELEDRVFVNCNTSIYRASSLSNCRHTSSVDE

SEQ ID NO: 4183 - protein, 42 aa, Artificial Sequence
  chemically synthesized
SQPSPFKIPIEELEDRVFVNCNTSIYRASSLSNCRHTSSVDE

SEQ ID NO: 4184 - protein, 42 aa, Artificial Sequence
  chemically synthesized
SQFSPFKIPIEELEDRVFVNCNTSIYRASSLSNCRHTSSVDE

SEQ ID NO: 4185 - protein, 42 aa, Artificial Sequence; identical to SEQ ID NO: 594
  chemically synthesized

SEQ ID NO: 4186 - protein, 42 aa, Artificial Sequence
  chemically synthesized
SQVYPFKIPIEELEDRVFVNCNTSIYRASSLSNCRHTSSVDE

SEQ ID NO: 4187 - protein, 42 aa, Artificial Sequence
  chemically synthesized
SQVSPWKIPIEELEDRVFVNCNTSIYRASSLSNCRHTSSVDE

SEQ ID NO: 4188 - protein, 42 aa, Artificial Sequence
  chemically synthesized
SQVSPYKIPIEELEDRVFVNCNTSIYRASSLSNCRHTSSVDE

SEQ ID NO: 4189 - protein, 42 aa, Artificial Sequence
  chemically synthesized
SQVSPHKIPIEELEDRVFVNCNTSIYRASSLSNCRHTSSVDE

SEQ ID NO: 4190 - protein, 42 aa, Artificial Sequence
  chemically synthesized
SQVSPFRIPIEELEDRVFVNCNTSIYRASSLSNCRHTSSVDE

SEQ ID NO: 4191 - protein, 42 aa, Artificial Sequence
  chemically synthesized
SQVSPFHIPIEELEDRVFVNCNTSIYRASSLSNCRHTSSVDE

SEQ ID NO: 4192 - protein, 42 aa, Artificial Sequence
  chemically synthesized
  misc_feature (7)..(7): Xaa can be a proteinogenic, non-proteinogenic or synthetic amino acid like ornithin or selenocystein
SQVSPFXIPIEELEDRVFVNCNTSIYRASSLSNCRHTSSVDE

SEQ ID NO: 4193 - protein, 42 aa, Artificial Sequence; identical to SEQ ID NO: 833
  chemically synthesized

SEQ ID NO: 4194 - protein, 42 aa, Artificial Sequence
  chemically synthesized
SQVSPFKHPIEELEDRVFVNCNTSIYRASSLSNCRHTSSVDE

SEQ ID NO: 4195 - protein, 42 aa, Artificial Sequence
  chemically synthesized
SQVSPFKVPIEELEDRVFVNCNTSIYRASSLSNCRHTSSVDE

SEQ ID NO: 4196 - protein, 42 aa, Artificial Sequence
  chemically synthesized
SQVSPFKFPIEELEDRVFVNCNTSIYRASSLSNCRHTSSVDE

SEQ ID NO: 4197 - protein, 42 aa, Artificial Sequence
  chemically synthesized
SQVSPFKMPIEELEDRVFVNCNTSIYRASSLSNCRHTSSVDE

SEQ ID NO: 4198 - protein, 42 aa, Artificial Sequence; identical to SEQ ID NO: 951
  chemically synthesized

SEQ ID NO: 4199 - protein, 42 aa, Artificial Sequence
  chemically synthesized
SQVSPFKIPHEELEDRVFVNCNTSIYRASSLSNCRHTSSVDE

SEQ ID NO: 4200 - protein, 42 aa, Artificial Sequence
  chemically synthesized
SQVSPFKIPVEELEDRVFVNCNTSIYRASSLSNCRHTSSVDE

SEQ ID NO: 4201 - protein, 42 aa, Artificial Sequence
  chemically synthesized
SQVSPFKIPFEELEDRVFVNCNTSIYRASSLSNCRHTSSVDE

SEQ ID NO: 4202 - protein, 42 aa, Artificial Sequence
  chemically synthesized
SQVSPFKIPMEELEDRVFVNCNTSIYRASSLSNCRHTSSVDE

SEQ ID NO: 4203 - protein, 42 aa, Artificial Sequence
  chemically synthesized
SQVSPFKIPIDELEDRVFVNCNTSIYRASSLSNCRHTSSVDE

SEQ ID NO: 4204 - protein, 42 aa, Artificial Sequence
  chemically synthesized
  misc_feature (11)..(11): Xaa can be a proteinogenic, non-proteinogenic or synthetic amino acid like ornithin or selenocystein
SQVSPFKIPIXELEDRVFVNCNTSIYRASSLSNCRHTSSVDE

SEQ ID NO: 4205 - protein, 42 aa, Artificial Sequence; identical to SEQ ID NO: 1191
  chemically synthesized

SEQ ID NO: 4206 - protein, 42 aa, Artificial Sequence
  chemically synthesized
  misc_feature (12)..(12): Xaa can be a proteinogenic, non-proteinogenic or synthetic amino acid like ornithin or selenocystein
SQVSPFKIPIEXLEDRVFVNCNTSIYRASSLSNCRHTSSVDE

SEQ ID NO: 4207 - protein, 42 aa, Artificial Sequence
  chemically synthesized
SQVSPFKIPIEEVEDRVFVNCNTSIYRASSLSNCRHTSSVDE

SEQ ID NO: 4208 - protein, 42 aa, Artificial Sequence; identical to SEQ ID NO: 1308
  chemically synthesized

SEQ ID NO: 4209 - protein, 42 aa, Artificial Sequence
  chemically synthesized
SQVSPFKIPIEEFEDRVFVNCNTSIYRASSLSNCRHTSSVDE

SEQ ID NO: 4210 - protein, 42 aa, Artificial Sequence
  chemically synthesized
SQVSPFKIPIEEHEDRVFVNCNTSIYRASSLSNCRHTSSVDE

SEQ ID NO: 4211 - protein, 42 aa, Artificial Sequence
  chemically synthesized
SQVSPFKIPIEEMEDRVFVNCNTSIYRASSLSNCRHTSSVDE

SEQ ID NO: 4212 - protein, 42 aa, Artificial Sequence; identical to SEQ ID NO: 1428
  chemically synthesized

SEQ ID NO: 4213 - protein, 42 aa, Artificial Sequence
  chemically synthesized
  misc_feature (14)..(14): Xaa can be a proteinogenic, non-proteinogenic or synthetic amino acid like ornithin or selenocystein
SQVSPFKIPIEELXDRVFVNCNTSIYRASSLSNCRHTSSVDE

SEQ ID NO: 4214 - protein, 42 aa, Artificial Sequence
  chemically synthesized
  misc_feature (15)..(15): Xaa can be a proteinogenic, non-proteinogenic or synthetic amino acid like ornithin or selenocystein
SQVSPFKIPIEELEXRVFVNCNTSIYRASSLSNCRHTSSVDE

SEQ ID NO: 4215 - protein, 42 aa, Artificial Sequence
  chemically synthesized
SQVSPFKIPIEELDERVFVNCNTSIYRASSLSNCRHTSSVDE

SEQ ID NO: 4216 - protein, 42 aa, Artificial Sequence; identical to SEQ ID NO: 1547
  chemically synthesized

SEQ ID NO: 4217 - protein, 42 aa, Artificial Sequence
  chemically synthesized
SQVSPFKIPIEELEDHVFVNCNTSIYRASSLSNCRHTSSVDE

SEQ ID NO: 4218 - protein, 42 aa, Artificial Sequence
  chemically synthesized
  misc_feature (16)..(16): Xaa can be a proteinogenic, non-proteinogenic or synthetic amino acid like ornithin or selenocystein
SQVSPFKIPIEELEDXVFVNCNTSIYRASSLSNCRHTSSVDE

SEQ ID NO: 4219 - protein, 42 aa, Artificial Sequence; identical to SEQ ID NO: 1664
  chemically synthesized

SEQ ID NO: 4220 - protein, 42 aa, Artificial Sequence
  chemically synthesized
SQVSPFKIPIEELEDRLFVNCNTSIYRASSLSNCRHTSSVDE

SEQ ID NO: 4221 - protein, 42 aa, Artificial Sequence
  chemically synthesized
SQVSPFKIPIEELEDRFFVNCNTSIYRASSLSNCRHTSSVDE

SEQ ID NO: 4222 - protein, 42 aa, Artificial Sequence
  chemically synthesized
SQVSPFKIPIEELEDRHFVNCNTSIYRASSLSNCRHTSSVDE

SEQ ID NO: 4223 - protein, 42 aa, Artificial Sequence
  chemically synthesized
SQVSPFKIPIEELEDRMFVNCNTSIYRASSLSNCRHTSSVDE

SEQ ID NO: 4224 - protein, 42 aa, Artificial Sequence; identical to SEQ ID NO: 1781
  chemically synthesized

SEQ ID NO: 4225 - protein, 42 aa, Artificial Sequence
  chemically synthesized
SQVSPFKIPIEELEDRVLVNCNTSIYRASSLSNCRHTSSVDE

SEQ ID NO: 4226 - protein, 42 aa, Artificial Sequence
  chemically synthesized
SQVSPFKIPIEELEDRVVVNCNTSIYRASSLSNCRHTSSVDE

SEQ ID NO: 4227 - protein, 42 aa, Artificial Sequence
  chemically synthesized
SQVSPFKIPIEELEDRVHVNCNTSIYRASSLSNCRHTSSVDE

SEQ ID NO: 4228 - protein, 42 aa, Artificial Sequence
  chemically synthesized
SQVSPFKIPIEELEDRVMVNCNTSIYRASSLSNCRHTSSVDE

SEQ ID NO: 4229 - protein, 42 aa, Artificial Sequence; identical to SEQ ID NO: 1898
  chemically synthesized

SEQ ID NO: 4230 - protein, 42 aa, Artificial Sequence
  chemically synthesized
SQVSPFKIPIEELEDRVFLNCNTSIYRASSLSNCRHTSSVDE

SEQ ID NO: 4231 - protein, 42 aa, Artificial Sequence
  chemically synthesized
SQVSPFKIPIEELEDRVFFNCNTSIYRASSLSNCRHTSSVDE

SEQ ID NO: 4232 - protein, 42 aa, Artificial Sequence
  chemically synthesized
SQVSPFKIPIEELEDRVFHNCNTSIYRASSLSNCRHTSSVDE

SEQ ID NO: 4233 - protein, 42 aa, Artificial Sequence
  chemically synthesized
SQVSPFKIPIEELEDRVFMNCNTSIYRASSLSNCRHTSSVDE

SEQ ID NO: 4234 - protein, 42 aa, Artificial Sequence; identical to SEQ ID NO: 2019
  chemically synthesized

SEQ ID NO: 4235 - protein, 42 aa, Artificial Sequence
  chemically synthesized
SQVSPFKIPIEELEDRVFVNSNTSIYRASSLSNCRHTSSVDE

SEQ ID NO: 4236 - protein, 42 aa, Artificial Sequence
  chemically synthesized
SQVSPFKIPIEELEDRVFVNGNTSIYRASSLSNCRHTSSVDE

SEQ ID NO: 4237 - protein, 42 aa, Artificial Sequence
  chemically synthesized
SQVSPFKIPIEELEDRVFVNANTSIYRASSLSNCRHTSSVDE

SEQ ID NO: 4238 - protein, 42 aa, Artificial Sequence; identical to SEQ ID NO: 2260
  chemically synthesized

SEQ ID NO: 4239 - protein, 42 aa, Artificial Sequence; identical to SEQ ID NO: 2380
  chemically synthesized

SEQ ID NO: 4240 - protein, 42 aa, Artificial Sequence
  chemically synthesized
SQVSPFKIPIEELEDRVFVNCNYSIYRASSLSNCRHTSSVDE

SEQ ID NO: 4241 - protein, 42 aa, Artificial Sequence; identical to SEQ ID NO: 2500
  chemically synthesized

SEQ ID NO: 4242 - protein, 42 aa, Artificial Sequence
  chemically synthesized
SQVSPFKIPIEELEDRVFVNCNTYIYRASSLSNCRHTSSVDE

SEQ ID NO: 4243 - protein, 42 aa, Artificial Sequence
  chemically synthesized
SQVSPFKIPIEELEDRVFVNCNTSVYRASSLSNCRHTSSVDE

SEQ ID NO: 4244 - protein, 42 aa, Artificial Sequence; identical to SEQ ID NO: 2617
  chemically synthesized

SEQ ID NO: 4245 - protein, 42 aa, Artificial Sequence
  chemically synthesized
SQVSPFKIPIEELEDRVFVNCNTSHYRASSLSNCRHTSSVDE

SEQ ID NO: 4246 - protein, 42 aa, Artificial Sequence
  chemically synthesized
SQVSPFKIPIEELEDRVFVNCNTSFYRASSLSNCRHTSSVDE

SEQ ID NO: 4247 - protein, 42 aa, Artificial Sequence
  chemically synthesized
SQVSPFKIPIEELEDRVFVNCNTSMYRASSLSNCRHTSSVDE

SEQ ID NO: 4248 - protein, 42 aa, Artificial Sequence
  chemically synthesized
SQVSPFKIPIEELEDRVFVNCNTSIWRASSLSNCRHTSSVDE

SEQ ID NO: 4249 - protein, 42 aa, Artificial Sequence
  chemically synthesized
SQVSPFKIPIEELEDRVFVNCNTSIFRASSLSNCRHTSSVDE

SEQ ID NO: 4250 - protein, 42 aa, Artificial Sequence
  chemically synthesized
SQVSPFKIPIEELEDRVFVNCNTSISRASSLSNCRHTSSVDE

SEQ ID NO: 4251 - protein, 42 aa, Artificial Sequence; identical to SEQ ID NO: 2735
  chemically synthesized

SEQ ID NO: 4252 - protein, 42 aa, Artificial Sequence
  chemically synthesized
  misc_feature (27)..(27): Xaa can be a proteinogenic, non-proteinogenic or synthetic amino acid like ornithin or selenocystein
SQVSPFKIPIEELEDRVFVNCNTSIYXASSLSNCRHTSSVDE

SEQ ID NO: 4253 - protein, 42 aa, Artificial Sequence
  chemically synthesized
SQVSPFKIPIEELEDRVFVNCNTSIYHASSLSNCRHTSSVDE

SEQ ID NO: 4254 - protein, 42 aa, Artificial Sequence; identical to SEQ ID NO: 2854
  chemically synthesized

SEQ ID NO: 4255 - protein, 42 aa, Artificial Sequence; identical to SEQ ID NO: 2975
  chemically synthesized

SEQ ID NO: 4256 - protein, 42 aa, Artificial Sequence; identical to SEQ ID NO: 3095
  chemically synthesized

SEQ ID NO: 4257 - protein, 42 aa, Artificial Sequence
  chemically synthesized
SQVSPFKIPIEELEDRVFVNCNTSIYRAYSLSNCRHTSSVDE

SEQ ID NO: 4258 - protein, 42 aa, Artificial Sequence; identical to SEQ ID NO: 3215
  chemically synthesized

SEQ ID NO: 4259 - protein, 42 aa, Artificial Sequence
  chemically synthesized
SQVSPFKIPIEELEDRVFVNCNTSIYRASYLSNCRHTSSVDE

SEQ ID NO: 4260 - protein, 42 aa, Artificial Sequence; identical to SEQ ID NO: 3332
  chemically synthesized

SEQ ID NO: 4261 - protein, 42 aa, Artificial Sequence
  chemically synthesized
SQVSPFKIPIEELEDRVFVNCNTSIYRASSVSNCRHTSSVDE

SEQ ID NO: 4262 - protein, 42 aa, Artificial Sequence
  chemically synthesized
SQVSPFKIPIEELEDRVFVNCNTSIYRASSFSNCRHTSSVDE

SEQ ID NO: 4263 - protein, 42 aa, Artificial Sequence
  chemically synthesized
SQVSPFKIPIEELEDRVFVNCNTSIYRASSMSNCRHTSSVDE

SEQ ID NO: 4264 - protein, 42 aa, Artificial Sequence
  chemically synthesized
SQVSPFKIPIEELEDRVFVNCNTSIYRASSHSNCRHTSSVDE

SEQ ID NO: 4265 - protein, 42 aa, Artificial Sequence; identical to SEQ ID NO: 3452
  chemically synthesized

SEQ ID NO: 4266 - protein, 42 aa, Artificial Sequence
  chemically synthesized
SQVSPFKIPIEELEDRVFVNCNTSIYRASSLYNCRHTSSVDE

SEQ ID NO: 4267 - protein, 42 aa, Artificial Sequence; identical to SEQ ID NO: 3573
  chemically synthesized

SEQ ID NO: 4268 - protein, 42 aa, Artificial Sequence
  chemically synthesized
SQVSPFKIPIEELEDRVFVNCNTSIYRASSLSNSRHTSSVDE

SEQ ID NO: 4269 - protein, 42 aa, Artificial Sequence
  chemically synthesized
SQVSPFKIPIEELEDRVFVNCNTSIYRASSLSNGRHTSSVDE

SEQ ID NO: 4270 - protein, 42 aa, Artificial Sequence
  chemically synthesized
SQVSPFKIPIEELEDRVFVNCNTSIYRASSLSNARHTSSVDE

SEQ ID NO: 4271 - protein, 42 aa, Artificial Sequence
  chemically synthesized
  misc_feature (35)..(35): Xaa can be a proteinogenic, non-proteinogenic or synthetic amino acid like ornithin or selenocystein
SQVSPFKIPIEELEDRVFVNCNTSIYRASSLSNCXHTSSVDE

SEQ ID NO: 4272 - protein, 42 aa, Artificial Sequence
  chemically synthesized
SQVSPFKIPIEELEDRVFVNCNTSIYRASSLSNCHHTSSVDE

SEQ ID NO: 4273 - protein, 42 aa, Artificial Sequence; identical to SEQ ID NO: 3692
  chemically synthesized

SEQ ID NO: 4274 - protein, 42 aa, Artificial Sequence
  chemically synthesized
SQVSPFKIPIEELEDRVFVNCNTSIYRASSLSNCRGTSSVDE

SEQ ID NO: 4275 - protein, 42 aa, Artificial Sequence
  chemically synthesized
SQVSPFKIPIEELEDRVFVNCNTSIYRASSLSNCRATSSVDE

SEQ ID NO: 4276 - protein, 42 aa, Artificial Sequence
  chemically synthesized
SQVSPFKIPIEELEDRVFVNCNTSIYRASSLSNCRITSSVDE

SEQ ID NO: 4277 - protein, 42 aa, Artificial Sequence
  chemically synthesized
SQVSPFKIPIEELEDRVFVNCNTSIYRASSLSNCRLTSSVDE

SEQ ID NO: 4278 - protein, 42 aa, Artificial Sequence
  chemically synthesized
SQVSPFKIPIEELEDRVFVNCNTSIYRASSLSNCRMTSSVDE

SEQ ID NO: 4279 - protein, 42 aa, Artificial Sequence
  chemically synthesized
SQVSPFKIPIEELEDRVFVNCNTSIYRASSLSNCRVTSSVDE

SEQ ID NO: 4280 - protein, 42 aa, Artificial Sequence; identical to SEQ ID NO: 3812
  chemically synthesized

SEQ ID NO: 4281 - protein, 42 aa, Artificial Sequence
  chemically synthesized
SQVSPFKIPIEELEDRVFVNCNTSIYRASSLSNCRHYSSVDE

SEQ ID NO: 4282 - protein, 42 aa, Artificial Sequence; identical to SEQ ID NO: 3932
  chemically synthesized

SEQ ID NO: 4283 - protein, 42 aa, Artificial Sequence
  chemically synthesized
SQVSPFKIPIEELEDRVFVNCNTSIYRASSLSNCRHTYSVDE

SEQ ID NO: 4284 - protein, 42 aa, Artificial Sequence; identical to SEQ ID NO: 4052
  chemically synthesized

SEQ ID NO: 4285 - protein, 42 aa, Artificial Sequence
  chemically synthesized
SQVSPFKIPIEELEDRVFVNCNTSIYRASSLSNCRHTSYVDE

SEQ ID NO: 4286 - protein, 42 aa, Artificial Sequence; identical to SEQ ID NO: 4169
  chemically synthesized

SEQ ID NO: 4287 - protein, 42 aa, Artificial Sequence
  chemically synthesized
SQVSPFKIPIEELEDRVFVNCNTSIYRASSLSNCRHTSSLDE

SEQ ID NO: 4288 - protein, 42 aa, Artificial Sequence
  chemically synthesized
SQVSPFKIPIEELEDRVFVNCNTSIYRASSLSNCRHTSSFDE

SEQ ID NO: 4289 - protein, 42 aa, Artificial Sequence
  chemically synthesized
SQVSPFKIPIEELEDRVFVNCNTSIYRASSLSNCRHTSSHDE

SEQ ID NO: 4290 - protein, 42 aa, Artificial Sequence
  chemically synthesized
SQVSPFKIPIEELEDRVFVNCNTSIYRASSLSNCRHTSSMDE

SEQ ID NO: 4291 - protein, 42 aa, Artificial Sequence
  chemically synthesized
SQVSPFKIPIEELEDRVFVNCNTSIYRASSLSNCRHTSSVDD

SEQ ID NO: 4292 - protein, 42 aa, Artificial Sequence
  chemically synthesized
  misc_feature (42)..(42): Xaa can be a proteinogenic, non-proteinogenic or synthetic amino acid like ornithin or selenocystein
SQVSPFKIPIEELEDRVFVNCNTSIYRASSLSNCRHTSSVDX

SEQ ID NO: 4293 - protein, 42 aa, Artificial Sequence
  chemically synthesized
SQVSAFKIPIEELEDRVFVNCNTSIYRASSLSNCRHTSSVDE

SEQ ID NO: 4294 - protein, 42 aa, Artificial Sequence
  chemically synthesized
SQVSGFKIPIEELEDRVFVNCNTSIYRASSLSNCRHTSSVDE

SEQ ID NO: 4295 - protein, 42 aa, Artificial Sequence
  chemically synthesized
SQVSPFKIAIEELEDRVFVNCNTSIYRASSLSNCRHTSSVDE

SEQ ID NO: 4296 - protein, 42 aa, Artificial Sequence
  chemically synthesized
SQVSPFKIGIEELEDRVFVNCNTSIYRASSLSNCRHTSSVDE

SEQ ID NO: 4297 - protein, 42 aa, Artificial Sequence; identical to SEQ ID NO: 120
  chemically synthesized

SEQ ID NO: 4298 - protein, 42 aa, Artificial Sequence; identical to SEQ ID NO: 239
  chemically synthesized

SEQ ID NO: 4299 - protein, 42 aa, Artificial Sequence
  chemically synthesized
YQVSPFKIPIEELEDRVFVNCNTSIYRASSLSNCRHTSSVED

SEQ ID NO: 4300 - protein, 42 aa, Artificial Sequence; identical to SEQ ID NO: 359
  chemically synthesized

SEQ ID NO: 4301 - protein, 42 aa, Artificial Sequence; identical to SEQ ID NO: 477
  chemically synthesized

SEQ ID NO: 4302 - protein, 42 aa, Artificial Sequence
  chemically synthesized
SQISPFKIPIEELEDRVFVNCNTSIYRASSLSNCRHTSSVED

SEQ ID NO: 4303 - protein, 42 aa, Artificial Sequence
  chemically synthesized
SQPSPFKIPIEELEDRVFVNCNTSIYRASSLSNCRHTSSVED

SEQ ID NO: 4304 - protein, 42 aa, Artificial Sequence
  chemically synthesized
SQFSPFKIPIEELEDRVFVNCNTSIYRASSLSNCRHTSSVED

SEQ ID NO: 4305 - protein, 42 aa, Artificial Sequence; identical to SEQ ID NO: 596
  chemically synthesized

SEQ ID NO: 4306 - protein, 42 aa, Artificial Sequence
  chemically synthesized
SQVYPFKIPIEELEDRVFVNCNTSIYRASSLSNCRHTSSVED

SEQ ID NO: 4307 - protein, 42 aa, Artificial Sequence
  chemically synthesized
SQVSPWKIPIEELEDRVFVNCNTSIYRASSLSNCRHTSSVED

SEQ ID NO: 4308 - protein, 42 aa, Artificial Sequence
  chemically synthesized
SQVSPYKIPIEELEDRVFVNCNTSIYRASSLSNCRHTSSVED

SEQ ID NO: 4309 - protein, 42 aa, Artificial Sequence
  chemically synthesized
SQVSPHKIPIEELEDRVFVNCNTSIYRASSLSNCRHTSSVED

SEQ ID NO: 4310 - protein, 42 aa, Artificial Sequence
  chemically synthesized
SQVSPFRIPIEELEDRVFVNCNTSIYRASSLSNCRHTSSVED

SEQ ID NO: 4311 - protein, 42 aa, Artificial Sequence
  chemically synthesized
SQVSPFHIPIEELEDRVFVNCNTSIYRASSLSNCRHTSSVED

SEQ ID NO: 4312 - protein, 42 aa, Artificial Sequence
  chemically synthesized
  misc_feature (7)..(7): Xaa can be a proteinogenic, non-proteinogenic or synthetic amino acid like ornithin or selenocystein
SQVSPFXIPIEELEDRVFVNCNTSIYRASSLSNCRHTSSVED

SEQ ID NO: 4313 - protein, 42 aa, Artificial Sequence; identical to SEQ ID NO: 835
  chemically synthesized

SEQ ID NO: 4314 - protein, 42 aa, Artificial Sequence
  chemically synthesized
SQVSPFKHPIEELEDRVFVNCNTSIYRASSLSNCRHTSSVED

SEQ ID NO: 4315 - protein, 42 aa, Artificial Sequence
  chemically synthesized
SQVSPFKVPIEELEDRVFVNCNTSIYRASSLSNCRHTSSVED

SEQ ID NO: 4316 - protein, 42 aa, Artificial Sequence
  chemically synthesized
SQVSPFKFPIEELEDRVFVNCNTSIYRASSLSNCRHTSSVED

SEQ ID NO: 4317 - protein, 42 aa, Artificial Sequence
  chemically synthesized
SQVSPFKMPIEELEDRVFVNCNTSIYRASSLSNCRHTSSVED

SEQ ID NO: 4318 - protein, 42 aa, Artificial Sequence; identical to SEQ ID NO: 953
  chemically synthesized

SEQ ID NO: 4319 - protein, 42 aa, Artificial Sequence
  chemically synthesized
SQVSPFKIPHEELEDRVFVNCNTSIYRASSLSNCRHTSSVED

SEQ ID NO: 4320 - protein, 42 aa, Artificial Sequence
  chemically synthesized
SQVSPFKIPVEELEDRVFVNCNTSIYRASSLSNCRHTSSVED

SEQ ID NO: 4321 - protein, 42 aa, Artificial Sequence
  chemically synthesized
SQVSPFKIPFEELEDRVFVNCNTSIYRASSLSNCRHTSSVED

SEQ ID NO: 4322 - protein, 42 aa, Artificial Sequence
  chemically synthesized
SQVSPFKIPMEELEDRVFVNCNTSIYRASSLSNCRHTSSVED

SEQ ID NO: 4323 - protein, 42 aa, Artificial Sequence; identical to SEQ ID NO: 1073
  chemically synthesized

SEQ ID NO: 4324 - protein, 42 aa, Artificial Sequence
  chemically synthesized
  misc_feature (11)..(11): Xaa can be a proteinogenic, non-proteinogenic or synthetic amino acid like ornithin or selenocystein
SQVSPFKIPIXELEDRVFVNCNTSIYRASSLSNCRHTSSVED

SEQ ID NO: 4325 - protein, 42 aa, Artificial Sequence; identical to SEQ ID NO: 1193
  chemically synthesized

SEQ ID NO: 4326 - protein, 42 aa, Artificial Sequence
  chemically synthesized
  misc_feature (12)..(12): Xaa can be a proteinogenic, non-proteinogenic or synthetic amino acid like ornithin or selenocystein
SQVSPFKIPIEXLEDRVFVNCNTSIYRASSLSNCRHTSSVED

SEQ ID NO: 4327 - protein, 42 aa, Artificial Sequence
  chemically synthesized
SQVSPFKIPIEEVEDRVFVNCNTSIYRASSLSNCRHTSSVED

SEQ ID NO: 4328 - protein, 42 aa, Artificial Sequence; identical to SEQ ID NO: 1310
  chemically synthesized

SEQ ID NO: 4329 - protein, 42 aa, Artificial Sequence
  chemically synthesized
SQVSPFKIPIEEFEDRVFVNCNTSIYRASSLSNCRHTSSVED

SEQ ID NO: 4330 - protein, 42 aa, Artificial Sequence
  chemically synthesized
SQVSPFKIPIEEHEDRVFVNCNTSIYRASSLSNCRHTSSVED

SEQ ID NO: 4331 - protein, 42 aa, Artificial Sequence
  chemically synthesized
SQVSPFKIPIEEMEDRVFVNCNTSIYRASSLSNCRHTSSVED

SEQ ID NO: 4332 - protein, 42 aa, Artificial Sequence; identical to SEQ ID NO: 1430
  chemically synthesized

SEQ ID NO: 4333 - protein, 42 aa, Artificial Sequence
  chemically synthesized
  misc_feature (14)..(14): Xaa can be a proteinogenic, non-proteinogenic or synthetic amino acid like ornithin or selenocystein
SQVSPFKIPIEELXDRVFVNCNTSIYRASSLSNCRHTSSVED

SEQ ID NO: 4334 - protein, 42 aa, Artificial Sequence
  chemically synthesized
  misc_feature (15)..(15): Xaa can be a proteinogenic, non-proteinogenic or synthetic amino acid like ornithin or selenocystein
SQVSPFKIPIEELEXRVFVNCNTSIYRASSLSNCRHTSSVED

SEQ ID NO: 4335 - protein, 42 aa, Artificial Sequence; identical to SEQ ID NO: 120
  chemically synthesized

SEQ ID NO: 4336 - protein, 42 aa, Artificial Sequence; identical to SEQ ID NO: 1549
  chemically synthesized

SEQ ID NO: 4337 - protein, 42 aa, Artificial Sequence
  chemically synthesized
SQVSPFKIPIEELEDHVFVNCNTSIYRASSLSNCRHTSSVED

SEQ ID NO: 4338 - protein, 42 aa, Artificial Sequence
  chemically synthesized
  misc_feature (16)..(16): Xaa can be a proteinogenic, non-proteinogenic or synthetic amino acid like ornithin or selenocystein
SQVSPFKIPIEELEDXVFVNCNTSIYRASSLSNCRHTSSVED

SEQ ID NO: 4339 - protein, 42 aa, Artificial Sequence; identical to SEQ ID NO: 1666
  chemically synthesized

SEQ ID NO: 4340 - protein, 42 aa, Artificial Sequence
  chemically synthesized
SQVSPFKIPIEELEDRLFVNCNTSIYRASSLSNCRHTSSVED

SEQ ID NO: 4341 - protein, 42 aa, Artificial Sequence
  chemically synthesized
SQVSPFKIPIEELEDRFFVNCNTSIYRASSLSNCRHTSSVED

SEQ ID NO: 4342 - protein, 42 aa, Artificial Sequence
  chemically synthesized
SQVSPFKIPIEELEDRHFVNCNTSIYRASSLSNCRHTSSVED

SEQ ID NO: 4343 - protein, 42 aa, Artificial Sequence
  chemically synthesized
SQVSPFKIPIEELEDRMFVNCNTSIYRASSLSNCRHTSSVED

SEQ ID NO: 4344 - protein, 42 aa, Artificial Sequence; identical to SEQ ID NO: 1783
  chemically synthesized

SEQ ID NO: 4345 - protein, 42 aa, Artificial Sequence
  chemically synthesized
SQVSPFKIPIEELEDRVLVNCNTSIYRASSLSNCRHTSSVED

SEQ ID NO: 4346 - protein, 42 aa, Artificial Sequence
  chemically synthesized
SQVSPFKIPIEELEDRVVVNCNTSIYRASSLSNCRHTSSVED

SEQ ID NO: 4347 - protein, 42 aa, Artificial Sequence
  chemically synthesized
SQVSPFKIPIEELEDRVHVNCNTSIYRASSLSNCRHTSSVED

SEQ ID NO: 4348 - protein, 42 aa, Artificial Sequence
  chemically synthesized
SQVSPFKIPIEELEDRVMVNCNTSIYRASSLSNCRHTSSVED

SEQ ID NO: 4349 - protein, 42 aa, Artificial Sequence; identical to SEQ ID NO: 1900
  chemically synthesized

SEQ ID NO: 4350 - protein, 42 aa, Artificial Sequence
  chemically synthesized
SQVSPFKIPIEELEDRVFLNCNTSIYRASSLSNCRHTSSVED

SEQ ID NO: 4351 - protein, 42 aa, Artificial Sequence
  chemically synthesized
SQVSPFKIPIEELEDRVFFNCNTSIYRASSLSNCRHTSSVED

SEQ ID NO: 4352 - protein, 42 aa, Artificial Sequence
  chemically synthesized
SQVSPFKIPIEELEDRVFHNCNTSIYRASSLSNCRHTSSVED

SEQ ID NO: 4353 - protein, 42 aa, Artificial Sequence
  chemically synthesized
SQVSPFKIPIEELEDRVFMNCNTSIYRASSLSNCRHTSSVED

SEQ ID NO: 4354 - protein, 42 aa, Artificial Sequence; identical to SEQ ID NO: 2021
  chemically synthesized

SEQ ID NO: 4355 - protein, 42 aa, Artificial Sequence
  chemically synthesized
SQVSPFKIPIEELEDRVFVNSNTSIYRASSLSNCRHTSSVED

SEQ ID NO: 4356 - protein, 42 aa, Artificial Sequence
  chemically synthesized
SQVSPFKIPIEELEDRVFVNGNTSIYRASSLSNCRHTSSVED

SEQ ID NO: 4357 - protein, 42 aa, Artificial Sequence
  chemically synthesized
SQVSPFKIPIEELEDRVFVNANTSIYRASSLSNCRHTSSVED

SEQ ID NO: 4358 - protein, 42 aa, Artificial Sequence; identical to SEQ ID NO: 2262
  chemically synthesized

SEQ ID NO: 4359 - protein, 42 aa, Artificial Sequence; identical to SEQ ID NO: 2382
  chemically synthesized

SEQ ID NO: 4360 - protein, 42 aa, Artificial Sequence
  chemically synthesized
SQVSPFKIPIEELEDRVFVNCNYSIYRASSLSNCRHTSSVED

SEQ ID NO: 4361 - protein, 42 aa, Artificial Sequence; identical to SEQ ID NO: 2502
  chemically synthesized

SEQ ID NO: 4362 - protein, 42 aa, Artificial Sequence
  chemically synthesized
SQVSPFKIPIEELEDRVFVNCNTYIYRASSLSNCRHTSSVED

SEQ ID NO: 4363 - protein, 42 aa, Artificial Sequence
  chemically synthesized
SQVSPFKIPIEELEDRVFVNCNTSVYRASSLSNCRHTSSVED

SEQ ID NO: 4364 - protein, 42 aa, Artificial Sequence; identical to SEQ ID NO: 2619
  chemically synthesized

SEQ ID NO: 4365 - protein, 42 aa, Artificial Sequence
  chemically synthesized
SQVSPFKIPIEELEDRVFVNCNTSHYRASSLSNCRHTSSVED

SEQ ID NO: 4366 - protein, 42 aa, Artificial Sequence
  chemically synthesized
SQVSPFKIPIEELEDRVFVNCNTSFYRASSLSNCRHTSSVED

SEQ ID NO: 4367 - protein, 42 aa, Artificial Sequence
  chemically synthesized
SQVSPFKIPIEELEDRVFVNCNTSMYRASSLSNCRHTSSVED

SEQ ID NO: 4368 - protein, 42 aa, Artificial Sequence
  chemically synthesized
SQVSPFKIPIEELEDRVFVNCNTSIWRASSLSNCRHTSSVED

SEQ ID NO: 4369 - protein, 42 aa, Artificial Sequence
  chemically synthesized
SQVSPFKIPIEELEDRVFVNCNTSIFRASSLSNCRHTSSVED

SEQ ID NO: 4370 - protein, 42 aa, Artificial Sequence
  chemically synthesized
SQVSPFKIPIEELEDRVFVNCNTSISRASSLSNCRHTSSVED

SEQ ID NO: 4371 - protein, 42 aa, Artificial Sequence; identical to SEQ ID NO: 2737
  chemically synthesized

SEQ ID NO: 4372 - protein, 42 aa, Artificial Sequence
  chemically synthesized
  misc_feature (27)..(27): Xaa can be a proteinogenic, non-proteinogenic or synthetic amino acid like ornithin or selenocystein
SQVSPFKIPIEELEDRVFVNCNTSIYXASSLSNCRHTSSVED

SEQ ID NO: 4373 - protein, 42 aa, Artificial Sequence
  chemically synthesized
SQVSPFKIPIEELEDRVFVNCNTSIYHASSLSNCRHTSSVED

SEQ ID NO: 4374 - protein, 42 aa, Artificial Sequence; identical to SEQ ID NO: 2856
  chemically synthesized

SEQ ID NO: 4375 - protein, 42 aa, Artificial Sequence; identical to SEQ ID NO: 2977
  chemically synthesized

SEQ ID NO: 4376 - protein, 42 aa, Artificial Sequence; identical to SEQ ID NO: 3097
  chemically synthesized

SEQ ID NO: 4377 - protein, 42 aa, Artificial Sequence
  chemically synthesized
SQVSPFKIPIEELEDRVFVNCNTSIYRAYSLSNCRHTSSVED

SEQ ID NO: 4378 - protein, 42 aa, Artificial Sequence; identical to SEQ ID NO: 3217
  chemically synthesized

SEQ ID NO: 4379 - protein, 42 aa, Artificial Sequence
  chemically synthesized
SQVSPFKIPIEELEDRVFVNCNTSIYRASYLSNCRHTSSVED

SEQ ID NO: 4380 - protein, 42 aa, Artificial Sequence; identical to SEQ ID NO: 3334
  chemically synthesized

SEQ ID NO: 4381 - protein, 42 aa, Artificial Sequence
  chemically synthesized
SQVSPFKIPIEELEDRVFVNCNTSIYRASSVSNCRHTSSVED

SEQ ID NO: 4382 - protein, 42 aa, Artificial Sequence
  chemically synthesized
SQVSPFKIPIEELEDRVFVNCNTSIYRASSFSNCRHTSSVED

SEQ ID NO: 4383 - protein, 42 aa, Artificial Sequence
  chemically synthesized
SQVSPFKIPIEELEDRVFVNCNTSIYRASSMSNCRHTSSVED

SEQ ID NO: 4384 - protein, 42 aa, Artificial Sequence
  chemically synthesized
SQVSPFKIPIEELEDRVFVNCNTSIYRASSHSNCRHTSSVED

SEQ ID NO: 4385 - protein, 42 aa, Artificial Sequence; identical to SEQ ID NO: 3454
  chemically synthesized

SEQ ID NO: 4386 - protein, 42 aa, Artificial Sequence
  chemically synthesized
SQVSPFKIPIEELEDRVFVNCNTSIYRASSLYNCRHTSSVED

SEQ ID NO: 4387 - protein, 42 aa, Artificial Sequence; identical to SEQ ID NO: 3575
  chemically synthesized

SEQ ID NO: 4388 - protein, 42 aa, Artificial Sequence
  chemically synthesized
SQVSPFKIPIEELEDRVFVNCNTSIYRASSLSNSRHTSSVED

SEQ ID NO: 4389 - protein, 42 aa, Artificial Sequence
  chemically synthesized
SQVSPFKIPIEELEDRVFVNCNTSIYRASSLSNGRHTSSVED

SEQ ID NO: 4390 - protein, 42 aa, Artificial Sequence
  chemically synthesized
SQVSPFKIPIEELEDRVFVNCNTSIYRASSLSNARHTSSVED

SEQ ID NO: 4391 - protein, 42 aa, Artificial Sequence
  chemically synthesized
  misc_feature (35)..(35): Xaa can be a proteinogenic, non-proteinogenic or synthetic amino acid like ornithin or selenocystein
SQVSPFKIPIEELEDRVFVNCNTSIYRASSLSNCXHTSSVED

SEQ ID NO: 4392 - protein, 42 aa, Artificial Sequence
  chemically synthesized
SQVSPFKIPIEELEDRVFVNCNTSIYRASSLSNCHHTSSVED

SEQ ID NO: 4393 - protein, 42 aa, Artificial Sequence; identical to SEQ ID NO: 3694
  chemically synthesized

SEQ ID NO: 4394 - protein, 42 aa, Artificial Sequence
  chemically synthesized
SQVSPFKIPIEELEDRVFVNCNTSIYRASSLSNCRGTSSVED

SEQ ID NO: 4395 - protein, 42 aa, Artificial Sequence
  chemically synthesized
SQVSPFKIPIEELEDRVFVNCNTSIYRASSLSNCRATSSVED

SEQ ID NO: 4396 - protein, 42 aa, Artificial Sequence
  chemically synthesized
SQVSPFKIPIEELEDRVFVNCNTSIYRASSLSNCRITSSVED

SEQ ID NO: 4397 - protein, 42 aa, Artificial Sequence
  chemically synthesized
SQVSPFKIPIEELEDRVFVNCNTSIYRASSLSNCRLTSSVED

SEQ ID NO: 4398 - protein, 42 aa, Artificial Sequence
  chemically synthesized
SQVSPFKIPIEELEDRVFVNCNTSIYRASSLSNCRMTSSVED

SEQ ID NO: 4399 - protein, 42 aa, Artificial Sequence
  chemically synthesized
SQVSPFKIPIEELEDRVFVNCNTSIYRASSLSNCRVTSSVED

SEQ ID NO: 4400 - protein, 42 aa, Artificial Sequence; identical to SEQ ID NO: 3814
  chemically synthesized

SEQ ID NO: 4401 - protein, 42 aa, Artificial Sequence
  chemically synthesized
SQVSPFKIPIEELEDRVFVNCNTSIYRASSLSNCRHYSSVED

SEQ ID NO: 4402 - protein, 42 aa, Artificial Sequence; identical to SEQ ID NO: 3934
  chemically synthesized

SEQ ID NO: 4403 - protein, 42 aa, Artificial Sequence
  chemically synthesized
SQVSPFKIPIEELEDRVFVNCNTSIYRASSLSNCRHTYSVED

SEQ ID NO: 4404 - protein, 42 aa, Artificial Sequence; identical to SEQ ID NO: 4054
  chemically synthesized

SEQ ID NO: 4405 - protein, 42 aa, Artificial Sequence
  chemically synthesized
SQVSPFKIPIEELEDRVFVNCNTSIYRASSLSNCRHTSYVED

SEQ ID NO: 4406 - protein, 42 aa, Artificial Sequence; identical to SEQ ID NO: 4171
  chemically synthesized

SEQ ID NO: 4407 - protein, 42 aa, Artificial Sequence
  chemically synthesized
SQVSPFKIPIEELEDRVFVNCNTSIYRASSLSNCRHTSSLED

SEQ ID NO: 4408 - protein, 42 aa, Artificial Sequence
  chemically synthesized
SQVSPFKIPIEELEDRVFVNCNTSIYRASSLSNCRHTSSFED

SEQ ID NO: 4409 - protein, 42 aa, Artificial Sequence
  chemically synthesized
SQVSPFKIPIEELEDRVFVNCNTSIYRASSLSNCRHTSSHED

SEQ ID NO: 4410 - protein, 42 aa, Artificial Sequence
  chemically synthesized
SQVSPFKIPIEELEDRVFVNCNTSIYRASSLSNCRHTSSMED

SEQ ID NO: 4411 - protein, 42 aa, Artificial Sequence; identical to SEQ ID NO: 4291
  chemically synthesized

SEQ ID NO: 4412 - protein, 42 aa, Artificial Sequence
  chemically synthesized
  misc_feature (41)..(41): Xaa can be a proteinogenic, non-proteinogenic or synthetic amino acid like ornithin or selenocystein
SQVSPFKIPIEELEDRVFVNCNTSIYRASSLSNCRHTSSVXD

SEQ ID NO: 4413 - protein, 42 aa, Artificial Sequence
  chemically synthesized
SQVSAFKIPIEELEDRVFVNCNTSIYRASSLSNCRHTSSVED

SEQ ID NO: 4414 - protein, 42 aa, Artificial Sequence
  chemically synthesized
SQVSGFKIPIEELEDRVFVNCNTSIYRASSLSNCRHTSSVED

SEQ ID NO: 4415 - protein, 42 aa, Artificial Sequence
  chemically synthesized
SQVSPFKIAIEELEDRVFVNCNTSIYRASSLSNCRHTSSVED

SEQ ID NO: 4416 - protein, 42 aa, Artificial Sequence
  chemically synthesized
SQVSPFKIGIEELEDRVFVNCNTSIYRASSLSNCRHTSSVED

SEQ ID NO: 4417 - protein, 42 aa, Homo sapiens
GQVSPFKIPIEELEDRVFVNCNTSIYRASSLSNCRHTSSVEE

SEQ ID NO: 4418 - protein, 41 aa, Homo sapiens
QVSPFKIPIEELEDRVFVNCNTSIYRASSLSNCRHTSSVEE

SEQ ID NO: 4419 - protein, 40 aa, Homo sapiens
VSPFKIPIEELEDRVFVNCNTSIYRASSLSNCRHTSSVEE

SEQ ID NO: 4420 - protein, 39 aa, Homo sapiens
SPFKIPIEELEDRVFVNCNTSIYRASSLSNCRHTSSVEE

SEQ ID NO: 4421 - protein, 38 aa, Homo sapiens
PFKIPIEELEDRVFVNCNTSIYRASSLSNCRHTSSVEE

SEQ ID NO: 4422 - protein, 37 aa, Homo sapiens
FKIPIEELEDRVFVNCNTSIYRASSLSNCRHTSSVEE

SEQ ID NO: 4423 - protein, 36 aa, Homo sapiens
KIPIEELEDRVFVNCNTSIYRASSLSNCRHTSSVEE

SEQ ID NO: 4424 - protein, 35 aa, Homo sapiens
IPIEELEDRVFVNCNTSIYRASSLSNCRHTSSVEE

SEQ ID NO: 4425 - protein, 34 aa, Homo sapiens
PIEELEDRVFVNCNTSIYRASSLSNCRHTSSVEE

SEQ ID NO: 4426 - protein, 33 aa, Homo sapiens
IEELEDRVFVNCNTSIYRASSLSNCRHTSSVEE

SEQ ID NO: 4427 - protein, 32 aa, Homo sapiens
EELEDRVFVNCNTSIYRASSLSNCRHTSSVEE

SEQ ID NO: 4428 - protein, 41 aa, Homo sapiens
GQVSPFKIPIEELEDRVFVNCNTSIYRASSLSNCRHTSSVE

SEQ ID NO: 4429 - protein, 40 aa, Homo sapiens
GQVSPFKIPIEELEDRVFVNCNTSIYRASSLSNCRHTSSV

SEQ ID NO: 4430 - protein, 39 aa, Homo sapiens
GQVSPFKIPIEELEDRVFVNCNTSIYRASSLSNCRHTSS

SEQ ID NO: 4431 - protein, 38 aa, Homo sapiens
GQVSPFKIPIEELEDRVFVNCNTSIYRASSLSNCRHTS

SEQ ID NO: 4432 - protein, 37 aa, Homo sapiens
GQVSPFKIPIEELEDRVFVNCNTSIYRASSLSNCRHT

SEQ ID NO: 4433 - protein, 36 aa, Homo sapiens
GQVSPFKIPIEELEDRVFVNCNTSIYRASSLSNCRH

SEQ ID NO: 4434 - protein, 35 aa, Homo sapiens
GQVSPFKIPIEELEDRVFVNCNTSIYRASSLSNCR

SEQ ID NO: 4435 - protein, 34 aa, Homo sapiens
GQVSPFKIPIEELEDRVFVNCNTSIYRASSLSNC

SEQ ID NO: 4436 - protein, 33 aa, Homo sapiens
GQVSPFKIPIEELEDRVFVNCNTSIYRASSLSN

SEQ ID NO: 4437 - protein, 32 aa, Homo sapiens
GQVSPFKIPIEELEDRVFVNCNTSIYRASSLS

SEQ ID NO: 4438 - protein, 42 aa, Artificial Sequence
  chemically synthesized
  MISC_FEATURE: synthetic
SESVNISTNVNRFHTFPYCEIAEVSCRSKVRIELDLQSPESS

SEQ ID NO: 4439 - DNA, 30 bp, Homo sapiens
ttcaagatacctatagaggaacttgaggac

SEQ ID NO: 4440 - DNA, 29 bp, Homo sapiens
tagacctggtcattcctcaacagagcttg
